(19) United States
(12) Patent Application Publication
(10) Pub. No.: US 2014/0371095 A1
(43) Pub. Date: Dec. 18, 2014

(54) NOVEL METHOD FOR IDENTIFYING SPECIFIC MARKER SEQUENCES FOR PROSTATE CANCER

(71) Applicant: Protagen AG, Dortmund (DE)

(72) Inventors: Peter Amersdorfer, Graz (AT); Angelika Lueking, Bochum (DE); Axel Kowald, Bochum (DE); Bettina Schlick, Innsbruck (AT); Petra Massoner, Innsbruck (AT); Christof Seifart, Innsbruck (AT); Georg Schäfer, Innsbruck (AT); Helmut Klocker, Inzing (AT); Peter Schulz-Knappe, Hemmingen (DE); Klaus Marquart, Dortmund (DE)

(73) Assignee: Protagen AG, Dortmund (DE)

(21) Appl. No.: 14/357,806

(22) PCT Filed: Nov. 14, 2012
(86) PCT No.: PCT/EP2012/072658

§ 371 Date: Aug. 18, 2014

(30) Foreign Application Priority Data
Nov. 14, 2011 (EP) 11189067.9

(51) Int. Cl. G01N 33/574

(52) U.S. Cl. CPC G01N 33/57434
USPC 506/9; 506/18; 506/17

(57) ABSTRACT

The present invention relates to a novel method for identifying specific marker sequences for diagnosis of prostate cancer and/or for prognosis in prostate cancer, and to the use of the specific marker sequences identified with the aid of this method.

[0001] The present invention relates to a novel method for identifying specific marker sequences for diagnosis of prostate cancer and/or for prognosis in prostate cancer and also to the use of the identified specific marker sequences.

[0002] Protein biochips are gaining increasing industrial importance in analysis and diagnosis as well as in pharmaceutical development. Protein biochips have become established as screening tools.

[0003] Here, the rapid and highly parallel detection of a multiplicity of specifically binding analysis molecules in a single experiment is made possible. To produce protein biochips, it is necessary to have the required proteins available. In particular, protein expression libraries have been established for this purpose. High-throughput cloning of defined open reading frames is one possibility (Heyman, J. A., Cornthwaite, J., Foncerrada, L., Gilmore, J. R., Gontang, E., Hartman, K. J., Hernandez, C. L., Hood, R., Hull, H. M., Lee, W. Y., Marcil, R., Marsh, E. J., Mudd, K. M., Patino, M. J., Purcell, T. J., Rowland, J. J., Sindici, M. L. and Hoeffler, J. P. (1999) Genome-scale cloning and expression of individual open reading frames using topoisomerase I-mediated ligation. Genome Res, 9, 383-392; Kersten, B., Feilner, T., Kramer, A., Wehrmeyer, S., Possling, A., Witt, I., Zanor, M. I., Stracke, R., Lueking, A., Kreutzberger, J., Lehrach, H. and Cahill, D. J. (2003) Generation of Arabidopsis protein chip for antibody and serum screening. Plant Molecular Biology, 52, 999-1010; Reboul, J., Vaglio, P., Rual, J. F., Lamesch, P., Martinez, M., Armstrong, C. M., Li, S., Jacotot, L., Bertin, N., Janky, R., Moore, T., Hudson, J. R., Jr., Hartley, J. L., Brasch, M. A., Vandenhaute, J., Boulton, S., Endress, G. A., Jenna, S., Chevet, E., Papasotiropoulos, V., Tolias, P. P., Ptacek, J., Snyder, M., Huang, R., Chance, M. R., Lee, H., Doucette-Stamm, L., Hill, D. E. and Vidal, M. (2003) C. elegans ORFeome version 1.1: experimental verification of the genome annotation and resource for proteome-scale protein expression. Nat Genet, 34, 35-41; Walhout, A. J., Temple, G. F., Brasch, M. A., Hartley, J. L., Lorson, M. A., van den Heuvel, S. and Vidal, M. (2000) GATEWAY recombinational cloning: application to the cloning of large numbers of open reading frames or ORFeomes. Methods Enzymol, 328, 575-592). However, such an approach is closely linked to the progress of the genome sequencing projects and the annotation of these gene sequences. In addition, the determination of the expressed sequence is not always clear due to differential splicing processes. This problem can be avoided by the use of cDNA expression libraries (Büssow, K., Cahill, D., Nietfeld, W., Bancroft, D., Scherzinger, E., Lehrach, H. and Walter, G. (1998) A method for global protein expression and antibody screening on high-density filters of an arrayed cDNA library. Nucleic Acids Research, 26, 5007-5008; Büssow, K., Nordhoff, E., Lübbert, C., Lehrach, H. and Walter, G. (2000) A human cDNA library for high-throughput protein expression screening. Genomics, 65, 1-8; Holz, C., Lueking, A., Bovekamp, L., Gutjahr, C., Bolotina, N., Lehrach, H. and Cahill, D. J. (2001) A human cDNA expression library in yeast enriched for open reading frames. Genome Res, 11, 1730-1735; Lueking, A., Holz, C., Gotthold, C., Lehrach, H. and Cahill, D. (2000) A system for dual protein expression in Pichia pastoris and Escherichia coli, Protein Expr. Purif., 20, 372-378). Here, the cDNA of a specific tissue is cloned into a bacterial or eukaryotic expression vector, such as yeast. The vectors used for the expression are generally characterised in that they carry inducible promoters that may be used to control the time of protein expression. In addition, expression vectors have sequences for what are known as affinity epitopes or affinity proteins, which on the one hand permit the specific detection of the recombinant fusion proteins by means of an antibody directed against the affinity epitope, and on the other hand the specific purification via affinity chromatography (IMAC) is rendered possible.

[0004] By way of example, the gene products of a cDNA expression library from human foetal brain tissue in the bacterial expression system Escherichia coli were arranged in high-density format on a membrane and could be successfully screened with different antibodies. It was possible to show that the proportion of full-length proteins is at least 66%. Additionally, the recombinant proteins from expression libraries could be expressed and purified in a high-throughput manner (Braun P., Hu, Y., Shen, B., Halleck, A., Koundinya, M., Harlow, E. and LaBaer, J. (2002) Proteome-scale purification of human proteins from bacteria. Proc Natl Acad Sci USA, 99, 2654-2659; Büssow (2000) supra; Lueking, A., Horn, M., Eickhoff, H., Büssow, K., Lehrach, H. and Walter, G. (1999) Protein microarrays for gene expression and antibody screening. Analytical Biochemistry, 270, 103-111). Such protein biochips based on cDNA expression libraries are disclosed in particular in WO 99/57311 and WO 99/57312.

[0005] Furthermore, in addition to antigen-presenting protein biochips, antibody-presenting arrays are likewise described (Lal et al (2002) Antibody arrays: An embryonic but rapidly growing technology, DDT, 7, 143-149; Kusnezow et al. (2003), Antibody microarrays: An evaluation of production parameters, Proteomics, 3, 254-264).

[0006] The prevalence, incidence and mortality rate of prostate cancer are rising globally. Prostate cancer is the second most common fatal cancer among men. However, the incidence of prostate carcinoma here is much higher than the mortality: not every patient suffering from prostate cancer develops a progressive form. Progression of the prostate carcinoma is observed in only approximately one quarter of all cases, but leads to an aggressive, metastasising form of the disease, which results in death and for which there previously have been no efficient therapy options (Jemal, A., et al., Global cancer statistics. CA Cancer J Clin, 2011. 61(2): p. 69-90.). Biomarkers that are hardly validated are currently described, which allow a differentiation and prediction of the course of progressive/aggressive and non-progressive form of prostate cancer.

[0007] Various studies indicate that prostate cancer and inflammation are related to one another (Dennis, L. K., C. F. Lynch, and J. C. Torner, Epidemiologic association between prostatitis and prostate cancer. Urology, 2002. 60(1): p. 78-83; Sarma, A. V., et al., Sexual behaviour, sexually transmitted diseases and prostatitis: the risk of prostate cancer in black men. J Urol, 2006. 176(3): p. 1108-13). It is supposed that inflammatory processes in the prostate tissue (prostatitis) are accompanied by a high number of infiltrating immune cells and distinct cytokine and chemokine profile (De Marzo, A. M., et al., Inflammation in prostate carcinogenesis. Nat Rev Cancer, 2007. 7(4): p. 256-69; Culig, Z., Cytokine disbalance in common human cancers. Biochim Biophys Acta, 2011. 1813(2): p. 308-14; Maitland, N. J. and A. T. Collins, Inflammation as the primary aetiological agent of human prostate cancer: a stem cell connection? J Cell Biochem, 2008. 105(4): p. 931-9; Robert G., et al., Biomarkers for the diagnosis of prostatic inflammation in benign prostate hyperplasia. The Prostate 2011, 71: 1709-1711). Prostatitis is therefore a possible risk factor for prostate cancer which may also influence the progression of the disease. Prostatitis is currently diagnosed exclusively by means of biopsy and histopathological analysis.

[0008] WO2010/000874, in the name of the applicant, for example describes the diagnosis of prostate carcinoma and prostate inflammation by means of a protein biochip and provides certain diagnostic marker sequences for prostate cancer. Here, it was made possible for the first time to sensitively identify these marker sequences for the respective indications by means of protein biochips.

[0009] Certain genes and expression products thereof are associated with chronic inflammatory processes of the prostate. Robert et al. (The Prostate 2011, 71, 1701-1709) discloses the fact that CCR4, CCR7, CD40LG, CTLA4, ICOS, IL17, PTPRC, SELP and TFRC are significantly associated with chronic inflammatory processes in the prostate. Barbieri et al. (Histopathology 2012, 60, 187-198) describes non-synonymous point mutations in the SPOP gene which are associated with prostate cancer.

[0010] However, there is also a significant need to improve the diagnosis of prostate cancer and prognosis in prostate cancer. Here, there is a need in particular for markers for prostate cancer which allow simple and quick diagnosis and also prognosis.

[0011] The invention relates to a method for identifying specific marker sequences for diagnosis of prostate cancer and/or for the prognosis for prostate cancer, comprising the following steps:

[0012] a.) Selecting patients with prostate cancer and high inflammation values and/or patients with prostate cancer and low inflammation values,

[0013] b.) Determining the interaction of a sample from the selected patients with marker sequences to be tested, wherein the marker sequences to be tested are placed on a solid support,

[0014] c.) Selecting marker sequences that demonstrate an interaction, and

[0015] d.) Determining whether the selected marker sequences differ between progressive and non-progressive prostate cancer (specific marker sequences).

[0016] Chronic prostate inflammation is one of the main causes for false-positive serum PSA values during the routine health check of men from 50 years of age. The latest tests indicate that an inflamed microenvironment in the prostate promotes the development of the malignancy and progression of the metastatic disease. In spite of these findings, the diagnosis of chronic prostatitis is still possible only by means of a biopsy. This places stress both on the patient and on the health system. With the aid of the method according to the invention, simple non-invasive biomarkers (specific marker sequences) can be identified, which can be used as an indicator for inflammation of the prostate, preferably chronic inflammation and the early development or diagnosis of prostate cancer, preferably prostate carcinoma.

[0017] The provision of specific marker sequences permits a reliable diagnosis, prognosis and stratification of patients suffering from disorders ranging from prostate inflammatory diseases to prostate carcinoma. In a particularly preferred embodiment of the invention, the marker sequences to be tested are localised on a solid support. The marker sequences to be tested are particularly preferably used (presented) in the method according to the invention by means of a protein biochip.

[0018] With the development of prostate cancer, an immune response is produced in the body, since the patients produce antibodies against cancer cells, whereby prostate cancer-specific autoantibodies and autoantibody profiles are formed. These autoantibodies and autoantibody profiles can be detected in samples taken from the patient/test subject.

[0019] The cellular changes during the course of the development from inflammatory processes in the prostate to prostate cancer, for example the formation of antigens, in particular prostate cancer-specific antigens, are identified by the immune system as “foreign”. Autoantibodies are then produced in a target-oriented and specific manner by B cells. Both the antigens and autoantibodies, which can be formed during the course of the prostate cancer development and the progression of prostate cancer, may be specific marker sequences that can be identified using the method according to the invention. The antigens formed in conjunction with the inflammation or an inflammatory process in the prostate/in the prostate tissue and also the autoantibodies formed subsequently are inflammation markers in the sense of this invention. The invention relates to the identification and use of these inflammation markers.

[0020] The specific marker sequences, for example inflammation markers, allow a differentiation of the progressive/aggressive and non-progressive forms of prostate cancer as well as a prognostic test for prediction of the course of a prostate disease or prostate cancer. One embodiment of the invention concerns a method for identifying specific marker sequences, wherein the selected marker sequences, with low inflammation values, differ between progressive and non-progressive prostate cancer. In a particularly preferred embodiment of the method according to the invention, the selected marker sequences differ between progressive and non-progressive prostate cancer with high inflammation values.

[0021] In one embodiment of the invention, the marker sequences to be tested are the selected sequences, the specific marker sequences and inflammation markers and/or autoantigens and/or autoantibodies.

[0022] A particularly preferred embodiment of the invention concerns methods for identifying specific marker sequences, wherein it is determined by means of histological methods whether the selected marker sequences differ between progressive (malignant) and non-progressive (benign) prostate cancer, for example by means of the immunohistochemistry on prostate tissue.

[0023] The invention enables the identification of antigens and autoantigens as specific marker sequences for the inflammatory component in prostate cancer or prostate cancer development and/or progression. The invention also enables a delimitation of prostate cancer, in particular aggressive/progressive prostate cancer and benign inflammatory processes, such as prostatitis and BPH (benign prostate hyperplasia). The invention therefore also relates to a correlation of inflammatory reactions in the prostate with antibodies and/or autoantibodies, for example in the serum.

[0024] In a preferred embodiment of the method according to the invention, the selected patients or test subjects belong to the same population group (population).

[0025] The method can be applied to various populations and may lead there to the identification of different specific marker sequences. A main embodiment of the invention therefore concerns methods for identifying specific marker sequences, wherein the selected patients belong to one population. A population is constituted by organisms that belong to a certain species, preferably homo sapiens, and live in a certain geographical area. Examples of populations are “Europeans, Americans, Asians”. In the sense of the invention, a population may also mean a conformity in terms of certain genetic parameters, for example a conformity with respect to a genetic predisposition for prostate cancer and/or for inflammation parameters and/or inflammation markers. The method according to the invention is therefore also suitable for applications within the scope of personalised medicine.

[0026] In one embodiment of the method according to the invention, the sample of the selected patients or test subjects is a bodily fluid or a tissue sample, in particular blood, whole blood, blood plasma, blood serum, patient serum, urine, cerebrospinal fluid, or synovial fluid.

[0027] Inflammation-specific autoantibodies for example from blood serum of prostate cancer patients can be detected for example in comprehensive expression libraries.

[0028] A further embodiment of the invention concerns methods for identifying specific marker sequences, wherein the marker sequences are mRNA, si-RNA, microRNA, cDNA, peptide or protein, in particular antigens or autoantigens, or originate from an expression library, in particular an mRNA, si-RNA, microRNA, cDNA, peptide or protein expression library.

[0029] Patient samples can be divided into highly inflamed and mildly inflamed test samples, for example on the basis of the number of tissue-infiltrating lymphocytes. The corresponding serum samples can be analysed on protein microarrays. These protein microarrays preferably consist of more than 3,000 to 5,000 cancer- and inflammation-associated (recombinant) proteins. The comparison of the autoantibody profiles of patient groups with highly inflamed and mildly inflamed tissue results in the determination of specific marker sequences for prostate cancer.

[0030] In total, 997 different autoantibodies were detected in both patient groups (highly inflamed and mildly inflamed tissue). Significantly higher values for the individual autoantibodies were observed for 176 antigens with severe inflammation in the prostate carcinoma. The calculation of the diagnostic potential of this screening study gave a sensitivity value of 64% and a specificity value of 65%. These specific marker sequences have a diagnostic selectivity of 0.71.

[0031] In one embodiment of the method according to the invention, the marker sequences to be tested are selected from the group comprising SEQ ID No. 1-176 (proteins), SEQ ID No. 177-352 (DNA clone sequences) and SEQ ID No. 353-528 (related RNA sequences), partial sequences of SEQ ID No. 1-528 with at least 90%, preferably at least 95%, of the length of SEQ ID No. 1-528, and homologues of SEQ ID No. 1-528 with an identity of at least 95%, preferably at least 98% or more, to the corresponding marker sequences, and partial sequences of the homologues of SEQ ID No. 1-528 with at least 90%, preferably at least 95%, of the length of SEQ ID No. 1-528.

[0032] In one embodiment of the method according to the invention, the marker sequences to be tested are presented on a protein microarray.

[0033] The invention also relates to the use of one or more specific marker sequences obtainable by a method according to the invention for diagnosis of prostate cancer, preferably for diagnosis of prostate carcinoma.

[0034] The invention also relates to the use of one or more specific marker sequences obtainable by a method according to the invention for prognosis in prostate cancer and/or for stratification, in particular for risk stratification, or for therapy monitoring in prostate cancer.

[0035] The invention also relates to the use of SPOP and/or partial sequences and/or homologues of SPOP for diagnosis of prostate cancer and/or for prognosis in prostate cancer and/or for stratification in prostate cancer. SPOP (Homo sapiens speckle-type POZ protein) has the GI accession number gi/56117827.

[0036] The invention also relates to the use of STX18 and/or partial sequences and/or homologues of STX18 for diagnosis of prostate cancer and/or for prognosis in prostate cancer and/or for stratification in prostate cancer. STX18 (Homo sapiens syntaxin 18) has the GI accession number gi/39725935.

[0037] The invention also relates to the use of SPAST and/or partial sequences and/or homologues of SPAST for diagnosis of prostate cancer and/or for prognosis in prostate cancer and/or for stratification in prostate cancer. SPAST (Homo sapiens spastin) has the GI accession number gi/40806168.

[0038] Within the scope of studies forming the basis of the invention, three autoantibodies with significantly higher sensitivity and specificity values in the serum samples from the highly inflamed patients were firstly selected and characterised in greater detail. For all other marker sequences identified within the scope of this invention (SEQ ID No. 1 to 528), this characterisation can be applied similarly. It was possible to show by means of immunohistochemistry that SPAST, STX18 and SPOP are present in the epithelium of benign (non-progressive prostate cancer) and malignant (progressive prostate cancer) prostate areas. All three marker proteins demonstrate a much higher colour intensity in tissue sections from the highly inflamed patient groups. Here, interestingly, the highest colour intensity was able to be determined in tissue-infiltrating lymphocytes.

[0039] The invention therefore also relates to the use of the specific marker sequences obtainable using the method according to the invention, in particular the specific marker sequences SEQ ID N. 1 to 528, for example of SPOP, STX18 and/or SPAST, to distinguish between benign prostate cancer and malignant prostate cancer.

[0040] The invention also relates to an arrangement of specific marker sequences obtainable by a method according to the invention for diagnosis of prostate cancer and/or prognosis in prostate cancer and/or for stratification in prostate cancer. Here, the arrangement according to the invention may comprise or consist of one or more specific marker sequences obtainable by the method according to the invention.

[0041] The invention also relates to an arrangement of specific marker sequences obtainable by a method according to the invention for diagnosis of prostate cancer and/or prognosis in prostate cancer and/or for stratification in prostate cancer comprising or consisting of one or more specific marker sequences, and wherein the specific marker sequences are selected from the group comprising SEQ ID No 1-176 (proteins), SEQ ID No. 177-352 (DNA clone sequences) and SEQ ID No. 353-528 (related RNA sequences), partial sequences of SEQ ID No. 1-528 with at least 90%, preferably at least 95%, of the length of SEQ ID No. 1-528, and homologues of SEQ ID No. 1-528 with an identity of at least 95%, preferably at least 98% or more, to the corresponding marker sequences, and partial sequences of the homologues of SEQ ID No. 1-528 with at least 90%, preferably at least 95%, of the length of SEQ ID No. 1-528.

[0042] The invention also relates to an arrangement of specific marker sequences obtainable by a method according to the invention comprising or consisting of SPOP and/or partial sequences of SPOP and/or homologues of SPOP and/or STX18 and/or partial sequences of STX18 and/or homologues of STX18 and/or SPAST and/or partial sequences of SPAST and/or homologues of SPAST. The invention also relates to an arrangement according to the invention of specific marker sequences for diagnosis of prostate cancer and/or prognosis in prostate cancer and/or stratification in prostate cancer.

[0043] The invention also relates to an assay or protein microarray comprising an arrangement according to the invention of specific marker sequences and optionally further additives and excipients. The invention also relates to an assay or protein microarray (protein biochip) comprising an arrangement of specific marker sequences on a solid support.

[0044] The invention also relates to the use of an arrangement according to the invention or of an assay according to the invention or of a protein microarray according to the invention for identifying and characterising a substance for prostate cancer, in particular prostate carcinoma-containing agent for the detection of binding success, wherein a.) the arrangement or the assay or the protein microarray is brought into contact with at least one substance to be tested, and b.) binding success is detected.

[0045] The invention also relates to a diagnostic agent for diagnosis of prostate cancer and/or prognosis in prostate cancer, comprising an arrangement according to the invention and/or one or more specific marker sequences obtainable by a method according to the invention and/or selected from the group comprising specific marker sequences SEQ ID No 1-176 (proteins), SEQ ID No. 177-352 (DNA clone sequences) and SEQ ID No. 353-528 (related RNA sequences), partial sequences of SEQ ID No. 1-528 with at least 90%, preferably at least 95%, of the length of SEQ ID No. 1-528, and homologues of SEQ ID No. 1-528 with an identity of at least 95%, preferably at least 98% or more, to the corresponding marker sequences, and partial sequences of the homologues of SEQ ID No. 1-528 with at least 90%, preferably at least 95%, of the length of SEQ ID No. 1-528, in particular SPOP and/or STX18 and/or SPAST and/or a partial sequence and/or a homologue sequence thereof.

[0046] The invention also relates to a kit for diagnosis or prognosis or stratification of prostate cancer diseases containing one or more specific marker sequences obtainable by a method according to the invention and/or one or more of the marker sequences selected from the group comprising SEQ ID No 1-176 (proteins), SEQ ID No. 177-352 (DNA clone sequences) and SEQ ID No. 353-528 (related RNA sequences), partial sequences of SEQ ID No. 1-528 with at least 90%, preferably at least 95%, of the length of SEQ ID No. 1-528, and homologues of SEQ ID No. 1-528 with an identity of at least 95%, preferably at least 98% or more, to the corresponding marker sequences, and partial sequences of the homologues SEQ ID No. 1-528 with at least 90%, preferably at least 95%, of the length of SEQ ID No. 1-528, for example SPOP and/or STX18 and/or SPAST and/or a partial sequence and/or a homologue sequence.

[0047] The protein sequences SEQ ID No. 1-176, the DNA clone sequences (SEQ ID No. 177-352 and the RNA sequences SEQ ID No. 253-528 are specified in the accompanying sequence protocol, which forms part of this application.

[0048] The invention also relates to the use of a specific marker sequence obtained by a method according to the invention or selected from one of the sequences SEQ ID No. 1-528 or from SPOP or STX18 or SPAST or a partial sequence or a homologue sequence as affinity material for performing apheresis or blood washing in patients with prostate cancer.

[0049] The invention also relates to a target for the treatment and therapy of prostate cancer obtained by a method according to the invention or selected from one of the sequences SEQ ID No. 1-528 or from SPOP or STX18 or SPAST or a partial sequence or a homologue sequence.

[0050] The invention also relates to the use of an arrangement according to the invention or of an assay according to the invention for the screening of active agents (substances) for prostate cancer, in particular prostate carcinoma.

[0051] The invention also relates to a method for diagnosis of prostate cancer or for prognosis in prostate cancer, wherein

[0052] a.) one or more specific marker sequences obtained by a method according to the invention and/or one or more the selected marker sequences SEQ ID. No. 1-528 and/or SPOP and/or STX18 and/or SPAST and/or a partial sequence and/or a homologue sequence is/are applied to a solid support and

[0053] b.) is/are brought into contact with the bodily fluid or the tissue sample from a test subject or patient, and

[0054] c.) an interaction of the bodily fluid or tissue sample with the marker sequences from a.) is detected.

[0055] A particular embodiment of the invention concerns methods for the early detection and diagnosis of prostate cancer, wherein the interaction according to c.) indicates a prostate cancer-associated autoantibody profile of the patient or of a cohort or of a population group (population) or of a specific disease progression (prognosis) or of a certain response to a therapy/drug.

[0056] One or more specific marker sequences is/are used in a diagnosis method and/or in a diagnostic agent, a protein microarray or an arrangement. In a preferred embodiment, at least 2, for example 3, 4, 5, 6, 7, 8, 9, 10, preferably 15 to 20 marker sequences or 30 to 50 or 100 or more specific marker sequences are used together or in combination, for example directly in succession or in parallel.

[0057] An interaction of the bodily fluid or of the tissue sample with the specific marker sequence or marker sequences can be detected for example by means of a probe, in particular by means of an antibody.

[0058] The prediction of progression and/or an early diagnosis can make it possible, in the case of prostate cancer or threat of prostate cancer, for the patient in question to be treated and/or monitored in good time if it is determined that a severe progression of the disease is likely. In such a case, the patient can be closely monitored and/or treated in good time. On the other hand, patients can be identified in which a mild form of the disease and/or spontaneous healing is/are likely. In such a case, it may be that no treatment is necessary, which could contribute to savings in the health service.

[0059] The invention concerns embodiments in which 2 or more specific marker sequences, for example 3, 4, or 5 or more, 10 to or more, preferably 30 to 50 marker sequences or 50 to 100 or more marker sequences are determined on a patient to be tested.

[0060] In a further embodiment of the invention, the specific marker sequences according to the invention can also be supplemented or expanded with known biomarkers for this indication.

[0061] The stratification of patients with prostate inflammatory diseases up to prostate carcinoma in new or established sub-groups of prostate inflammation diseases up to prostate carcinoma, and the appropriate selection of patient groups for the clinical development of new therapeutic substances is also included. The term “therapy control” also includes the allocation of patients to responders and non-responders regarding a therapy or the therapy course thereof.

[0062] In the sense of this invention, “diagnosis” means the positive determination of prostate inflammatory diseases up to prostate carcinoma by means of the marker sequences according to the invention as well as the assignment of the patients to the prostate inflammatory disease up to prostate carcinoma. The term diagnosis includes the medical diagnostics and examinations in this regard, in particular in-vitro diagnostics and laboratory diagnostics, and also proteomics and nucleic acid blotting. Further tests may be necessary to be sure and to exclude other diseases. The term diagnosis therefore also includes the differential diagnosis of prostate inflammatory diseases and prostate carcinoma by means of the marker sequences according to the invention, and the prognosis of the prostate inflammatory diseases or prostate carcinoma.

[0063] In the sense of this invention, “stratification or therapy control” means that the method according to the invention renders possible decisions for the treatment and therapy of the patient, whether it is the hospitalisation of the patient, the use, efficacy and/or dosage of one or more drugs, or the monitoring of the course of a disease and the course of therapy or aetiology or classification of a disease, for example into a new or existing sub-type, or the differentiation of diseases and patients thereof.

[0064] In a further embodiment of the invention, the term “stratification” in particular includes the risk stratification with the prognosis of an “outcome” of a negative health event.

[0065] Within the scope of this invention, the term “patient” is understood to mean any test subject (human or mammal), with the provision that the test subject is tested for prostate inflammatory diseases to prostate carcinoma.

[0066] The terms “prostate inflammatory diseases”, “prostate cancer”, “prostate carcinoma” comprise a group of diseases from prostatitis to the chronic forms of all prostate inflammations and the establishment thereof as prostate cancer or prostate carcinoma (Definition for example according to Pschyrembel, de Gruyter, 261. Edition (2007), Berlin).

[0067] Prostate cancer includes all cancer diseases of the prostate, in particular prostate carcinoma. Prostate cancer includes all forms of the disease, that is to say progressive/aggressive forms and non-progressive forms.

[0068] “Prostate cancer-specific” or “specific” means that the marker sequence, for example the nucleic acid or the polypeptide or protein obtainable therefrom, interacts with substances from the bodily fluid or tissue sample from a patient with prostate cancer (for example antigen (epitope)/antibody (paratope) interaction). These substances from the bodily fluid or tissue sample either only occur or are expressed or occur or are expressed at least in an intensified manner in the case of prostate cancer, whereas these substances in patients without prostate cancer are not present or are only present to a smaller extent (smaller quantity, lower concentration). On the other hand, specific marker sequences can also be characterised in that they interact with substances from the bodily fluid or tissue sample from patients with prostate cancer because these substances no longer occur or are no longer expressed or only occur or are expressed at least in a much lower quantity/concentration in the case of prostate cancer, whereas these substances are present in patients without prostate cancer or are at least present to a much greater extent. Specific marker sequences may also be present in healthy test subjects, however the quantity (concentration) thereof changes for example with the development, establishment and therapy of prostate cancer. The specific marker sequences are therefore biomarkers for prostate cancer. The specific marker sequences may thus indicate a profile of substances from bodily fluid and tissue sampling, for example a prostate cancer-associated autoantibody profile.

[0069] “Prostate cancer-associated autoantibody profiles” thus include on the one hand the composition (one or more autoantibodies) and on the other hand the quantity/concentration of individual autoantibodies.

[0070] In a particularly preferred embodiment of the invention, the specific marker sequence is an antigen or part of an antigen or codes for an antigen or for part of an antigen.

[0071] In a particularly preferred embodiment, the specific marker sequence identifies/binds to autoantibodies that are present (intensified) during the course of the development, establishment and therapy of prostate cancer or are present to a smaller extent (or are no longer present). Autoantibodies are formed by the body against the body's own antigens, which for example are produced when prostate cancer is present. Autoantibodies are formed by the body against different substances and pathogens. Within the scope of the present invention, the autoantibodies in particular that are formed with the occurrence of and during the course of the development of prostate cancer and/or of which the expression is upregulated or downregulated are detected. These autoantibodies can be detected with the aid of the method according to the invention and specific marker sequences and are therefore used as an indication for prostate cancer. The detection and the monitoring of the quantity of prostate cancer-associated autoantibodies in the patient can be used for the early detection, diagnosis and/or therapy monitoring/therapy control. These autoantibody profiles may be sufficiently characterised already with use of a specific marker sequence. In other cases, two or more specific marker sequences are necessary in order to indicate a prostate cancer-associated autoantibody profile.

[0072] In preferred embodiments of the invention, these autoantibodies can be detected using specific marker sequences, which are derived from another individual, because they originate for example from a commercial cDNA bank.

[0073] In other preferred embodiments of the invention, these autoantibodies can be detected using specific marker sequences, which are derived from the same individual (autoantigen) because they originate for example from a cDNA bank produced especially for the patient or a group of patients (for example within the scope of personalised medicine. By way of example, homologues of the aforementioned specific marker sequences are then used, for example sequences that have non-synonymous mutations in the specific marker sequences.

[0074] Autoantibodies can be formed by the patient already many years before the occurrence of the first symptoms of the disease. Early detection, diagnosis and also prognosis and (preventative) treatment would therefore be possible years before the visible outbreak of the disease. The devices and means (arrangement, array, protein biochip, diagnostic agent, test kit) and methods according to the invention thus enable a very early intervention compared with known methods, which considerably improves the prognosis and survival rates. Since the prostate cancer-associated autoantibody profiles change during the establishment and treatment/therapy of prostate cancer, the invention also enables the detection and the monitoring of prostate cancer at any stage of development and treatment and also monitoring within the scope of aftercare. The means according to the invention also allow easy handling at home by the patient and cost-effective routine precautionary measures for early detection.

[0075] In particular due to the use of antigens as specific marker sequence for prostate cancer, which derive from sequences already known, for example from commercial cDNA banks, test subjects can be tested, and, where applicable, prostate cancer-associated autoantibodies present in these test subjects can be detected, even if the corresponding autoantigens are not (yet) known in this test subject.

[0076] Different patients may have different prostate cancer-associated autoantibody profiles, for example different cohorts or population groups (populations) differ from one another. Here, each patient may form one or more different prostate cancer-associated autoantibodies during the course of the development of prostate cancer and the progression of the disease, that is to say also different autoantibody profiles. In addition, the composition and/or the quantity of the formed specific autoantibodies may change during the course of the development and progression of the disease, such that a quantitative evaluation is necessary. The therapy/treatment of prostate cancer also leads to changes in the composition and/or the quantity of prostate cancer-associated autoantibodies. The large selection of specific marker sequences according to the invention allows the individual compilation of specific marker sequences in an arrangement for individual patients, groups of patients, certain cohorts, population groups, etc. In an individual case, the use of a specific marker sequence may therefore be sufficient, whereas in other cases at least two or more specific marker sequences have to be used together or in combination in order to produce a meaningful autoantibody profile.

[0077] Compared with other biomarkers, the detection of autoantibodies for example in the serum/plasma has the advantage of high stability and storage capability and good detectability. The presence of autoantibodies also is not subject to a circadian rhythm, and therefore the sampling is independent of the time of day, food intake and the like.

[0078] In addition, the prostate cancer-associated autoantibodies can be detected with the aid of the corresponding antigens/autoantigens in known assays, such as ELISA or Western Blot, and the results can be checked for this.

[0079] The term “specific marker sequence” in the sense of this invention means that the cDNA or the polypeptide or protein obtainable therefrom is significant for prostate inflammatory diseases and/or prostate cancer, for example prostate carcinoma. By way of example, the cDNA or the polypeptide or protein obtainable therefrom may interact with substances from the bodily fluid or tissue sample from a patient with prostate inflammatory diseases up to prostate carcinoma (for example antigen (epitope)/antibody (paratope) interaction).

[0080] It is essential to the invention that an interaction between the bodily fluid or tissue sample from a patient and the specific marker sequences is detected. Such an interaction is, for example, a bond, in particular a binding substance on at least one marker sequence according to the invention or in the case of a cDNA the hybridisation with a suitable substance under selected conditions, in particular stringent conditions (for example as defined conventionally in J. Sambrook, E. F. Fritsch, T. Maniatis (1989), Molecular cloning: A laboratory manual, 2nd Edition, Cold Spring Harbor Laboratory Press, Cold Spring Harbor, USA or Ausubel, “Current Protocols in Molecular Biology”, Green Publishing Associates and Wiley Interscience, N.Y. (1989)). One example of stringent hybridisation conditions is: hybridisation in 4×SSC at 65° C. (alternatively in 50% formamide and 4×SSC at 42° C.), followed by a number of washing steps in 0.1×SSC at 65° C. for a total of approximately one hour. An example of less stringent hybridisation conditions is hybridisation in 4×SSC at 37° C., followed by a number of washing steps in 1×SSC at room temperature.

[0081] The marker sequences to be tested and/or the specific marker sequences, in a further embodiment of the invention, have a recognition signal that is addressed to the substance to be bound (for example antibody, nucleic acid). In accordance with the invention, the recognition signal for a protein is preferably an epitope and/or paratope and/or hapten, and for a cDNA is preferably a hybridisation or binding region.

[0082] Examples of specific marker sequences that are obtainable in accordance with the method according to the invention are detailed in Tables 1 and 2 and can also be clearly identified by the respectively cited database entry (also accessible by Internet: http://www.ncbi.nlm.nih.gov/) (see in Table 1 (annex) and Table 2: accession no.), see also the associated sequence protocol.

[0083] The invention therefore also concerns the full-length sequences of the marker sequences according to the invention, more specifically as defined in Table 1 via the known database entry according to Table 1.

[0084] In accordance with the invention, the marker sequences also comprise modifications of the cDNA sequence and the corresponding amino acid sequence, such as chemical modification, such as citrullination, acetylation, phosphorylation, glycosylation or polyA strand and further modifications known as appropriate to a person skilled in the art.

[0085] In a further embodiment of the invention partial sequences (partial sequences also include fragments) or homologues of the marker sequences according to the invention are also included. Marker sequences according to the invention in the sense of the invention are specific marker sequences, marker sequences having SEQ ID No. 1-528 in accordance with the accompanying sequence protocol, SPOP, STX18 and SPAST.

[0086] The invention also includes the full-length sequences of the specific marker sequences SEQ ID No. 1-528 according to the invention.

[0087] Furthermore, embodiments of SEQ 1-528 analogue to (homologues, partial sequences of) the specific marker sequences SEQ 1-528, as presented for example in the claims, are therefore also included, since the SEQ 1-528 according to the invention in turn represent partial sequences, at least with high homology. However, the specific marker sequences SEQ 1-528 are preferred in accordance with the invention.

[0088] The invention also relates to homologues of the specific marker sequences and partial sequences, for example fragments of specific marker sequences.

[0089] For example, homologues are nucleic acid sequences and/or protein sequences that have an identity with the specific marker sequences of at least 70% or 80%, preferably 90% or 95%, particularly preferably 96% or 97% or more, for example 98% or 99% or more. In a particularly preferred embodiment of the invention, for the case in which the specific marker sequences are antigens, the homology in the sequence range in which the antigen-antibody or anti-autoantibody interaction takes place, is at least 95%, preferably at least 97%, particularly preferably at least 99%. In accordance with the invention, homologues produced by mutations such as base exchange mutations, raster mutations, base insertion mutations, base loss mutations, point mutations, or insertion mutations, for example, are included.

[0090] The invention also relates to partial sequences of the specific marker sequences. Partial sequences also include fragments of the marker sequences according to the invention, and partial sequences are nucleic acids or proteins/peptides that are shortened compared with the entire nucleic acid or the entire protein/peptide. Here, the deletion may occur at the end or the ends and/or within the sequence. For example, partial sequences and/or fragments that have 50 to 100 nucleotides, 70-120 nucleotides of an entire sequence are included, for example of SEQ 1-528. Homologues of partial sequences and fragments are also included in accordance with the invention. In a particular embodiment, the specific marker sequences are shortened compared with the sequences 1-528 to such an extent that they still consist only of the binding point(s) for the prostate cancer-associated autoantibody in question. In accordance with the invention, specific marker sequences are also included that differ from the sequences SEQ ID No. 1-528 in that they contain one or more insertions, wherein the insertions for example are 1 to 100 or more nucleotide/amino acids long, preferably 5 to 50, particularly preferably 10 to 20 nucleotides/amino acids long and the sequences are otherwise identical however or homologous to sequences 1-1578. Partial sequences that have at least 90%, preferably at least 95%, particularly preferably at least 97% or 98%, of the length of the specific marker sequences according to the invention are particularly preferred. In accordance with the invention, homologues of the partial sequences are also included. Homologues of the specific marker sequences that have one or more non-synonymous point mutations are particularly preferred.

[0091] The marker protein SPOP for example displays mutations of the SPOP gene. The described mutations were detected in 6-13% of the prostate cancer cases and lead to the loss of the protein activity. Since the production of prostate cancer associated antigens is caused inter alia by mutations, a total of 25 tissue samples were subjected to RNA sequencing within the scope of this invention. 23 samples had the wildtype sequence, however the mutation of the 134 codon was discovered in two of the samples. This SPOP mutation is a possible reason for the observed immunogenicity/immune response. In particular, non-synonymous point mutations in specific marker sequences SEQ ID No. 1 to 528 and the homologues deriving therefrom of the specific marker sequences SEQ ID No. 1 to 528 are therefore included in accordance with the invention.

[0092] Homologues or partial sequences of the marker sequences are in particular also of interest for the early detection, diagnosis, prognosis and therapy control in individual patient groups/population groups within the scope of personalised medicine, since the specific markers in question in the serum etc., for example the prostate cancer-specific autoantibodies, may differ from patient group/population group to patient group/population group.

[0093] In a further embodiment, the respective specific marker sequence can be represented in different quantities in one or more regions on the support. This allows a variation of the sensitivity. The regions may each have a totality of specific marker sequences, that is to say a sufficient number of different specific marker sequences, in particular 2, 3, 4, 5, 6, 7, 8, 9 or 10 or more different specific marker sequences, and where applicable further nucleic acids and/or proteins, in particular biomarkers.

[0094] In a further embodiment, the respective marker sequence can be represented in different quantities in one or more regions on a solid support. This permits a variation of the sensitivity. The regions may each have a totality of marker sequences, that is to say a sufficient number of different marker sequences, in particular 2 to 5 or 10 or more and optionally more nucleic acids and/or proteins, in particular biomarkers. However, at least 96 to 25,000 (numerical) or more from different or identical marker sequences and further nucleic acids and/or proteins, in particular biomarkers, are preferred. Furthermore preferred are more than 2,500, particularly preferably 10,000 or more different or identical marker sequence and optionally further nucleic acids and/or proteins, in particular biomarkers.

[0095] The invention also relates to arrangements of marker proteins. The arrangement preferably contains at least 2 to 5 or 10, preferably 30 to 50 marker sequences, or 50 to 100 or more marker sequences.

[0096] Within the scope of this invention, “arrangement” is synonymous with “array”, and, if this “array” is used to identify substances on marker sequences, this is to be understood to be an “assay” or a diagnostic device. In a preferred embodiment, the arrangement is designed such that the marker sequences represented on the arrangement are present in the form of a grid on a solid support. Furthermore, those arrangements are preferred that permit a high-density arrangement of protein binders and the marker sequences are spotted. Such high-density spotted arrangements are disclosed for example in WO 99/57311 and WO 99/57312 and can be used advantageously in a robot-supported automated high-throughput method.

[0097] Within the scope of this invention, however, the term “assay” or diagnostic device likewise comprises those embodiments of a device such as ELISA, bead-based assay, line assay, Western Blot, and immunochromatographic methods (for example what are known as lateral flow immunoassays) or similar immunological single or multiplex detection methods. A protein biochip in the sense of this invention is the systematic arrangement of proteins on a solid support.

[0098] The marker sequences of the arrangement are fixed on a solid support, but are preferably spotted or immobilised or even printed on, that is to say applied in a reproducible manner. One or more marker sequences can be present multiple times in the totality of all marker sequences and may be present in different quantities based on a spot. Furthermore, the marker sequences can be standardised on the solid support (for example by means of serial dilution series of, for example, human globulins as internal calibrators for data normalisation and quantitate evaluation).

[0099] The invention therefore concerns an assay or protein biochip consisting of an arrangement containing marker sequences according to the invention.

[0100] In a further embodiment, the marker sequences are present as clones. Such clones can be obtained for example by means of a cDNA expression library according to the invention (Büssow et al. 1998 (above)). In a preferred embodiment, such expression libraries containing clones are obtained using expression vectors from a cDNA expression library consisting of the cDNA marker sequences. These expression vectors preferably contain inducible promoters. The induction of the expression can be carried out for example by means of an inducer, such as IPTG. Suitable expression vectors are described in Terpe et al. (Terpe T Appl Microbiol Biotechnol. 2003 January; 60(5):523-33).

[0101] Expression libraries are known to a person skilled in the art; they can be produced in accordance with standard works, such as Sambrook et al, “Molecular Cloning, A laboratory handbook, 2nd edition (1989), CSH press, Cold Spring Harbor, N.Y. Expression libraries that are tissue-specific (for example human tissue, in particular human organs) are furthermore preferable. Further, expression libraries that can be obtained by means of exon-trapping are also included in accordance with the invention. Instead of the term expression library, reference may also be made synonymously to an expression bank.

[0102] Protein biochips or corresponding expression libraries that have do not exhibit any redundancy (what is known as a Uniclone® library) and that can be produced in accordance with the teaching of WO 99/57311 and WO 99/57312 are furthermore preferred. These preferred Uniclone® libraries have a high proportion of non-defective fully expressed proteins of a cDNA expression library.

[0103] Within the scope of this invention, the clones can also be, but are not limited to, transformed bacteria, recombinant phages or transformed cells of mammals, insects, fungi, yeasts or plants.

[0104] The clones are fixed, spotted or immobilised on a solid support.

[0105] The invention therefore relates to an arrangement, wherein the marker sequences are present as clones.

[0106] In addition, the marker sequences can be present in the respective form of a fusion protein, which for example contains at least one affinity epitope or “tag”. The tag may be or may contain one such as c-myc, his tag, arg tag, FLAG, alkaline phosphatase, V5 tag, T7 tag or strep tag, HAT tag, NusA, S tag, SBP tag, thioredoxin, DsbA, a fusion protein, preferably a cellulose-binding domain, green fluorescent protein, maltose-binding protein, calmodulin-binding protein, glutathione S-transferase or lacZ.

[0107] In all embodiments, the term “solid support” includes embodiments such as a filter, a membrane, a magnetic or fluorophore-labelled bead, silicon wafer, glass, metal, plastic, a chip, a mass spectrometry target or a matrix. However, a filter is preferred in accordance with the invention.

[0108] Furthermore, PVDF, nitrocellulose or nylon is preferred as a filter (for example Immobilon P Millipore, Protran Whatman, Hybond N+Amersham).

[0109] In a further preferred embodiment of the arrangement according to the invention, this corresponds to a grid with the dimensions of a microtiter plate (8-12 well strips, 96 wells, 384 wells or more), a silicon wafer, a chip, a mass spectrometry target or a matrix.

[0110] A substance to be tested may be any native or non-native biomolecule, a synthetic chemical molecule, a mixture or a substance library.

[0111] Once the substance to be tested contacts the marker sequence, the binding success is evaluated, and is performed for example with use of commercially available image analysing software (GenePix Pro (Axon Laboratories), Aida (Raytest), ScanArray (Packard Bioscience).

[0112] Interactions, for example protein-protein interactions (for example protein on the marker sequence to be tested or specific marker sequence, such as antigen/antibody) or corresponding “means for detecting the binding success” can be visualised for example by means of fluorescence labelling, biotinylation, radio-isotope labelling or colloid gold or latex particle labelling in the conventional manner. For example, bound antibodies are detected with the aid of secondary antibodies, which are labelled using commercially available reporter molecules (for example Cy, Alexa, Dyomics, FITC or similar fluorescent dyes, colloidal gold or latex particles), or with reporter enzymes, such as alkaline phosphatase, horseradish peroxidase, etc. and the corresponding colorimetric, fluorescent or chemoluminescent substrates. A readout is performed for example by means of a microarray laser scanner, a CCD camera or visually.

[0113] The following FIGURES and examples explain the invention, but do not limit the invention to the examples.

[0114] FIG. 1: volcano plot illustration of the 176 marker sequences (see Example 2).

### EXAMPLE 1

### Pre-Selection of the Patient Cohorts

[0115] The examined patients were divided into a group with low inflammation values and a group with high inflammation values and were characterised in terms of age size of the carcinoma, Gleason score, C-reactive protein, volume of the prostate, weight of the prostate, PSA and fPSA %. Prostate tissue of 70 patients with prostate cancer was examined histologically. Here, tissue samples were dyed immunohistochemically with p63 (blue) and CD45 (brown). The evaluation of the staining is intended primarily to clarify the question of how many immune cells are present in tumour areas compared with benign prostate areas. The difference between tumour/benign prostate can be ascertained on the basis of the p63 staining (benign with p63 positive).

[0116] An overview of the inflammation state in prostate tissues in cancer patients was made possible by means of IHC double staining. An ideal staining for an evaluation with HistoFaxs (Tissuegnostics) constitutes a p63 staining for distinction between tumour/benign tissue in red (FastRed) and a CD45 staining for detection of leucocytes in brown (DAP). Infiltrating immune cells can be detected by the pan-leucocyte marker CD45 in prostate tissue. As a result of this colour combination, p63 and CD45 are clearly evident compared with the haematoxylin counterstaining. The evaluation in the HistoFAXS was performed with the aid of the “single reference shade” (HistoQuant Program, Tissuegnostics).

[0117] Cytotoxic T-lymphocytes can be detected by the surface marker CD8 in prostate tissues. The counterstaining (tissue identification) is performed using haematoxylin.

[0118] 32 patients with prostate cancer and low inflammation values and 38 patients with prostate cancer and high inflammation values were identified in this way. All patients belonged to a certain population.

### EXAMPLE 2

### Identification of Specific Marker Sequences (Autoantibody Screening)

[0119] For the screening in a pilot test, a protein microarray from Protagen AG was used, which, in addition to ˜2,000 randomly selected human antigens, contains more than 1,500 further autoantigens, which were identified in prior internal tests in the indications prostate cancer, breast cancer, systemic lupus erythematosus (SLE), multiple sclerosis, rheumatoid arthritis and juvenile idiopathic arthritis. The sera of 32 patients with prostate cancer and low inflammation values and the sera of 38 patients with prostate cancer and high inflammation values were examined on this microarray. Specific markers for high and for low inflammation were determined via different bioinformatic/biostatistical approaches, such as single marker ranking by means of Mann Whitney Test, Volcano Plot analysis and classifications by means of support vector machines (SVM).

[0120] In this test, 997 different autoantibodies were identified in both patient cohorts (low inflammation, high inflammation) and in all serum samples. From this, the 176 specific marker sequences were determined in the highly inflamed serum samples (p<0.05; Mann-Whitney test; fold change >2).

[0121] In this test, 176 specific marker sequences were identified (see FIG. 1 volcano plot illustration). The amino acid sequences, the corresponding DNA sequences and the corresponding RNA sequences are specified in the accompanying sequence protocol under SEQ ID No. 1-528. In Table 1 (annex), the naming of the 176 protein sequences and also the accession number under which the proteins are stored are specified.

[0122] Table 2 reproduces a selection of 30 protein sequences that, interestingly, had already been identified as marker sequences in the case of prostate cancer during the course of this test (see WO2010/000874).

TABLE 2

| | | | p- | Fold |
|---|---|---|---|---|
| Rank | Name | GI Accession | Value | Change |
| 1 | Homo sapiens spastin (SPAST); transcript variant 1; mRNA | gi\|40806168 | 0.001 | 14.33 |
| 2 | Homo sapiens ribosomal protein L36a-like (RPL36AL); mRNA | gi\|34335143 | 0.001 | 5.16 |
| 5 | FEZ family zinc finger 2 | gi\|157388917 | 0.002 | 0.16 |
| 6 | Homo sapiens makorin, ring finger protein, 1 (MKRN1), mRNA | gi\|21359891 | 0.002 | 11.19 |
| 7 | acyl-CoA thioesterase 7 isoform hBACHd | gi\|32528286 | 0.003 | 6.11 |
| 15 | Homo sapiens ubiquitin-conjugating enzyme E2O (UBE2O); mRNA | gi\|33636749 | 0.005 | 11.81 |
| 21 | Homo sapiens coactosin-like (Dictyostelium) (COTL1), mRNA | gi\|23510452 | 0.007 | 7.44 |
| 22 | Homo sapiens tetratricopeptide repeat domain 5 (TTC5); mRNA | gi\|24308431 | 0.007 | 2.97 |
| 24 | IKBE_HUMAN NF-kappaB inhibitor epsilon (NF-kappa-BIE) (I-kappa-B-epsilon) | gi\|14548073 | 0.007 | 3.59 |
| | (IkappaBepsilon) (IKB-epsilon) (IKBE) | | | |
| 25 | Homo sapiens famesyl diphosphate synthase (famesyl pyrophosphate synthetase; | gi\|41281370 | 0.008 | 15.80 |
| | dimethylallyltranstransferase; geranyltranstransferase) (FDPS); mRNA | | | |
| 26 | Homo sapiens cyclin-dependent kinase 7 (MO15 homolog; Xenopus laevis; cdk-activating | gi\|16950659 | 0.008 | 22.02 |
| | kinase) (CDK7); mRNA | | | |
| 27 | low density lipoprotein receptor-related protein associated protein 1 | gi\|4505021 | 0.008 | 3.37 |
| 28 | Homo sapiens surfeit 5 (SURF5); transcript variant c; mRNA | gi\|31652217 | 0.008 | 9.33 |
| 32 | Homo sapiens tubulin, alpha 3 (TUBA3), mRNA | gi\|17986282 | 0.008 | 13.30 |
| 34 | Homo sapiens G protein-coupled receptor 161 (GPR161); transcript variant 2; mRNA | gi\|24476015 | 0.009 | 4.12 |
| 35 | Homo sapiens chromosome 2 genomic contig; alternate assembly (based on Celera assembly) | gi\|88958353 | 0.009 | 5.48 |
| 36 | Homo sapiens NOL1/NOP2/Sun domain family; membsr 5 (NSUN5); transcript variant 2; mRNA | gi\|23199996 | 0.009 | 3.03 |
| 37 | Homo sapiens chromosome 9 genomic contig. reference assembly | gi\|89029256 | 0.010 | 3.84 |
| 39 | similar to homoprotocatechuate catabolism bifunctional isomerase/decarboxylase | gi\|14336767 | 0.010 | 2.57 |
| 40 | PREDICTED: Homo sapiens similar to Myc-associated zinc finger protein (MAZI) (Purine- | gi\|113426244 | 0.011 | 5.00 |
| | binding transcription factor) (Pur-1) (ZF87) (ZIF87) (LOC642773), mRNA | | | |
| 41 | Homo sapiens chromosome 9 genomic contig. reference assembly | gi\|89029256 | 0.011 | 9.40 |
| 49 | Homo sapiens upstream binding transcription factor. RNA polymerase I (UBTF), mRNA | gi\|7657670 | 0.012 | 10.36 |
| 50 | Homo sapiens APC11 anaphase promoting complex subunit 11 homolog (yeast) (ANAPC11), | gi\|50409803 | 0.012 | 21.41 |
| | transcript variant 4, mRNA | | | |
| 51 | ribosomal protein L35a | gi\|16117791 | 0.012 | 16.39 |
| 54 | myotonic dystrophy protein kinase isoform 1 | gi\|126091095 | 0.014 | 3.37 |
| 55 | Homo sapiens hypothetical protein FLJ12949 (FLJ12949). transaipt variant 2, mRNA | gi\|30410780 | 0.014 | 3.92 |
| 56 | Homo sapiens nerve growth factor receptor (TNFRSF16) associated protein 1 (NGFRAP1); | gi\|46094059 | 0.014 | 11.31 |
| | transcript variant 2; mRNA | | | |
| 58 | Homo sapiens FERM; RhoGEF and pleckstrin domain protein 2 (FARP2); mRNA | gi\|7662309 | 0.014 | 4.65 |
| 59 | Homo sapiens chromosome 11 genomic contig; alternate assembly (based on Celera | gi\|89034479 | 0.014 | 4.64 |
| | assembly) | | | |
| 60 | Homo sapiens brain expressed X-linked 2 (BEX2) mRNA | gi\|50658085 | 0.014 | 4.02 |

### EXAMPLE 3

### Validation of the Specific Marker Sequences on Tissue Cuts/FFPE

[0123] In order to provide a sensible validation of the autoantibodies in accordance with a screen (in conjunction with the biostatistical evaluation), a testing of individual selected marker sequences (here, four selected marker proteins from Table 1) on FFPE tissue cuts from the prostate of patients with prostate cancer was performed in this step by means of IHC analyses. All other marker sequences SEQ ID No. 1-528 have to be characterised similarly in order to identify herefrom the marker sequences specific for the certain population.

[0124] The prostate tissue of 3 patients was tested.

[0125] The marker sequences (here marker proteins (=autoantigens)) were selected in accordance with the following principles—a) availability of IHC reagents, that is to say primary antibodies available for purchase, b) relevance of the marker from the literature, such as TTLL12, which plays a part in prostate tumour genesis, and c) the human protein atlas, where the further markers SPAST, SPOP, STX19 have already been analysed immunohistochemically. The result was successful for the IHC analysis.

TABLE 3
Primary antibodies available for purchase for IHC analysis

| Primary | | | | |
|---|---|---|---|---|
| Antibody | company | dilution | group | |
| SPAST | Sigma | 1:50 | High | Low |
| | HPA017311 | | inflammation, | inflammation, |
| | | | high AAB in | no AAB in |
| | | | serum | serum |
| SPOP | Sigma | 1:50 | High | Low |
| | SAB1406659 | | inflammation, | inflammation, |
| | | | high AAB in | no AAB in |
| | | | serum | serum |
| STX19 | Sigma | 1:100 | High | Low |
| | HPA003019 | | inflammation, | inflammation, |
| | | | high AAB in | no AAB in |
| | | | serum | serum |
| TTLL12 | | 1:100 | High | Low |
| | | | inflammation, | inflammation, |
| | | | high AAB in | no AAB in |
| | | | serum | serum |

[0126] It was possible to demonstrate that lymphocyte-infiltrated prostrate tissue displayed greater stain reactions for all four markers. SPOP and STX18 demonstrate a differentiated staining and are thus suitable for distinction between benign and cancer in areas in the prostate with low inflammation.

[0127] SPOP (speckle-type POZ protein) modulates the transcriptional repression activity of the death-associated protein 6 (DAXX): E3 ubiquitin ligase gene. SPOP plays a part in TNF-conveyed JNK signalling (kidney cancer). SPOP is mutated in prostate cancer. SPOP is localised in the nucleus.

### Immunohistochemistry (ICH):

[0128] With greater inflammation, SPOP demonstrates high autoantibody staining by means of IHC in prostate cells, wherein the staining in tissue cuts with prostate cancer is greater than in benign prostate cells. With processes demonstrating less inflammation, SPOP does not demonstrate autoantibody staining in prostate cells (Be greater than Ca).

### STX18 (Syntaxin 18)

[0129] Stx18 is a Q-SNARE (soluble N-ethylmaleimide-sensitive factor attachment receptor) protein associated with the endoplasmatic reticulum. Stx18 is a cell growth-inhibiting gene 9 protein. Implications in breast cancer and a moderate expression in prostate cancer are described for Stx18. Stx18 stains the plasma membrane in ICC.

### Immunohistochemistry:

[0130] With greater inflammation, Stx18 demonstrates a deep staining (high autoantibody mirror), but no difference between benign cells and cancer cells. With processes demonstrating less inflammation, Stx19 does not demonstrate autoantibody staining in prostate cells (Be greater than Ca).

[0131] SPAST (Spastin) belongs to the protein family that divides an ATPase domain and plays a part in various cellular processes, for example in membrane transport, intracellular mobility, biogenesis of organelles, protein folding and proteolysis. ATPase may be involved with the formation/arrangement or function of the nucleoprotein complex. SPAST stains the cytoplasm in prostate cells moderately and stains the membranes positively.

### Immunohistochemistry:

[0132] With greater inflammation, SPAST demonstrates deep staining (high autoantibody mirror), but no difference between benign cells and cancer cells. With processes demonstrating less inflammation, SPAST demonstrates no autoantibody staining in prostate cells and no difference between benign cells and cancer cells.

[0133] TTLL12 (tubulin tyrosine ligase-like family, member 12) (no AAB) reads (converts) tyrosine to a-tubulin, which is terminally detyrosinated. TTLL12 is important for neuronal organisation, trafficking of intermediate filament proteins, cell morphology and spindle positioning. TTLL12 expression is supressed during tumour progression (increase in detyrosinated tubulin), and the aggressiveness of the tumour increases. TTLL12 is expressed in the proliferating layer of benign prostate cells. The expression of TTLL12 increases with progressive cancer to metastasis. In many cell lines which are derived from metastasising prostate cancer cells the expression of TTLL12 is highly regulated. A downregulation of the TTLL12 expression has an effect on different post-translational modifications of tubulin. An over-expression of TTLL12 changes the chromosome ploidy.

### Immunohistochemistry:

[0134] With greater inflammation, TTLL12 demonstrates deep staining (high autoantibody mirror), wherein benign cells demonstrate a much greater staining than cancer cells. With processes demonstrating less inflammation, TTLL12 demonstrates no autoantibody staining in prostate cells and a very heterogeneous staining of the prostate cells.

[0135] All tested primary antibodies detect autoantibodies in prostate cells. They demonstrate a much deeper staining in highly inflammatory processes than in mildly inflammatory processes.

[0136] The targets of three autoantibodies that were found in blood serum samples of test subjects with highly inflammatory prostate cancer are expressed in prostate tissue.

[0137] Lymphocytes which infiltrate the prostate tissue demonstrated a deeper staining than the prostate tissue itself. This effect was found with all four tested primary antibodies.

[0138] STX18 and SPOP demonstrated different quantities in areas with prostate cancer and areas with benign epithelial cells. STX18 and SPOP were able to distinguish between benign and prostate cancer areas with mildly inflammatory prostate cancer. For further analysis, areas with mildly inflammatory tissue were tested with and without autoantibodies in blood serum samples.

[0139] Highly inflammatory areas are characterised by a high concentration of infiltrating lymphocytes. Mildly inflammatory areas are characterised by low or no infiltration of lymphocytes.

[0140] The results show that, with highly inflammatory processes, the four tested selected marker sequences do not demonstrate any differences in the staining with progressive/aggressive and non-invasive prostate cancer. In the case of mildly inflammatory processes in the prostate, the selected marker sequences SPOP and STX118, however, demonstrate a significant difference in the staining with progressive/aggressive prostate cancer compared with non-invasive prostate cancer. SPOP and STX18 (both demonstrate a deeper staining with non-invasive/benign prostate cancer) are therefore specific marker sequences in the sense of the invention. They are suitable for diagnosis, prognosis and stratification.

### EXAMPLE 4

### Point Mutations in SPOP

[0141] The RNA was extracted and sequenced from 25 tissue samples from patients with high inflammation values. The mutation of the K134R in the tissue samples of 2 patients was detected in SPOP (Mutation in Codon 134).

TABLE 1

| SEQ | | | | |
|---|---|---|---|---|
| ID | | | Protein | |
| No. | Gene ID | Taxonomy | Accession No | Definition |
| 1 | 7541 | 9606 | gi\|19923242 | zinc finger protein 161 homologue [Homo sapiens] |
| 2 | 54617 | 9606 | gi\|38708321 | INO80 complex homologue 1 [Homo sapiens] |
| 3 | 29889 | 9606 | gi\|7019419 | guanine nucleotide binding protein-like 2 (nucleolar) [Homo sapiens] |
| 4 | 25776 | 9606 | gi\|7656942 | PKD2 interactor, golgi and endoplasmic reticulum associated 1 isoform a [Homo sapiens] |
| 5 | 11135 | 9606 | gi\|23238226 | CDC42 effector protein 1 [Homo sapiens] |
| 6 | 7358 | 9606 | gi\|4507813 | UDP-glucose dehydrogenase [Homo sapiens] |
| 7 | 79656 | 9606 | gi\|187828564 | BEN domain containing 5 [Homo sapiens] |
| 8 | 9925 | 9606 | gi\|7662074 | zinc finger and BTB domain containing 5 [Homo sapiens] |
| 9 | 6166 | 9606 | gi\|4506651 | ribosomal protein L36a-like protein [Homo sapiens] |
| 10 | 5878 | 9606 | gi\|41393545 | RAB5C, member RAS oncogene family isoform b [Homo sapiens] |
| 11 | 4843 | 9606 | gi\|24041029 | nitric oxide synthase 2A [Homo sapiens] |
| 12 | 9126 | 9606 | gi\|4885399 | structural maintenance of chromosomes 3 [Homo sapiens] |
| 13 | 1844 | 9606 | gi\|4758206 | dual specificity phosphatase 2 [Homo sapiens] |
| 14 | 439 | 9606 | gi\|50428938 | arsA arsenite transporter, ATP-binding, homologue 1 [Homo sapiens] |
| 15 | 203 | 9606 | gi\|4502011 | adenylate kinase 1 [Homo sapiens] |
| 16 | 4794 | 9606 | gi\|71274109 | nuclear factor of kappa light polypeptide gene enhancer in B-cells inhibitor, epsilon [Homo sapiens] |
| 17 | 10274 | 9606 | gi\|62243696 | stromal antigen 1 [Homo sapiens] |
| 18 | 2098 | 9606 | gi\|33413400 | S-formylglutathione hydrolase [Homo sapiens] |
| 19 | 88 | 9606 | gi\|4501893 | actinin, alpha 2 [Homo sapiens] |
| 20 | 59343 | 9606 | gi\|54607091 | SUMO1/sentrin/SMT3 specific protease 2 [Homo sapiens] |
| 21 | 91875 | 9606 | gi\|226498382 | tetratricopeptide repeat protein 5 [Homo sapiens] |
| 22 | 7419 | 9606 | gi\|25188179 | voltage-dependent anion channel 3 isoform b [Homo sapiens] |
| 23 | 8424 | 9606 | gi\|4502369 | gamma-butyrobetaine dioxygenase [Homo sapiens] |
| 24 | 54934 | 9606 | gi\|154426300 | hypothetical protein LOC54934 [Homo sapiens] |
| 25 | 7073 | 9606 | gi\|4507499 | TIA-1 related protein isoform 1 [Homo sapiens] |
| 26 | 9170 | 9606 | gi\|7305013 | lysophosphatidic acid receptor 2 [Homo sapiens] |
| 27 | 51440 | 9606 | gi\|7705419 | hippocalcin-like protein 4 [Homo sapiens] |
| 28 | 644096 | 9606 | gi\|111038124 | hypothetical protein LOC644096 [Homo sapiens] |
| 29 | 57645 | 9606 | gi\|22027480 | pogo transposable element with KRAB domain [Homo sapiens] |
| 30 | 975 | 9606 | gi\|4757944 | CD81 antigen [Homo sapiens] |
| 31 | 2954 | 9606 | gi\|22202624 | glutathione transferase zeta 1 isoform 1 [Homo sapiens] |
| 32 | 10765 | 9606 | gi\|57242796 | jumonji, AT rich interactive domain 1B [Homo sapiens] |
| 33 | 81889 | 9606 | gi\|215422413 | fumarylacetoacetate hydrolase domain containing 1 isoform 3 [Homo sapiens] |
| 34 | 23450 | 9606 | gi\|54112121 | splicing factor 3b, subunit 3 [Homo sapiens] |
| 35 | 6117 | 9606 | gi\|4506583 | replication protein A1, 70 kDa [Homo sapiens] |
| 36 | 3033 | 9606 | gi\|94557308 | L-3-hydroxyacyl-Coenzyme A dehydrogenase precursor [Homo sapiens] |
| 37 | 1663 | 9606 | gi\|100913204 | probable ATP-dependent RNA helicase DDX11 isoform 2 [Homo sapiens] |
| 38 | 1022 | 9606 | gi\|4502743 | cyclin-dependent kinase 7 [Homo sapiens] |
| 39 | 112812 | 9606 | gi\|72534754 | ferredoxin 1-like [Homo sapiens] |
| 40 | 716 | 9606 | gi\|4502495 | complement component 1, s subcomponent [Homo sapiens] |
| 41 | 8882 | 9606 | gi\|4508021 | zinc finger protein 259 [Homo sapiens] |
| 42 | 1760 | 9606 | gi\|126091095 | myotonic dystrophy protein kinase isoform 1 [Homo sapiens] |
| 43 | 337867 | 9606 | gi\|221316645 | RecName: Full = Ubiquitin-associated domain-containing protein 2; AltName: Full = Phosphoglycerate |
| | | | | dehydrogenase-like protein 1; Flags: Precursor |
| 44 | 9770 | 9606 | gi\|7661964 | Ras association domain family 2 [Homo sapiens] |
| 45 | 4000 | 9606 | gi\|5031875 | lamin A/C isoform 2 [Homo sapiens] |
| 46 | 55816 | 9606 | gi\|29544726 | docking protein 5 [Homo sapiens] |
| 47 | 22902 | 9606 | gi\|7662352 | RUN and FYVE domain containing 3 isoform 2 [Homo sapiens] |
| 48 | 9570 | 9606 | gi\|16905522 | golgi SNAP receptor complex member 2 isoform A [Homo sapiens] |
| 49 | 58491 | 9606 | gi\|11034821 | zinc finger protein 71 [Homo sapiens] |
| 50 | 55746 | 9606 | gi\|26051235 | nucleoporin 133 kDa [Homo sapiens] |
| 51 | 39 | 9606 | gi\|148539872 | acetyl-Coenzyme A acetyltransferase 2 [Homo sapiens] |
| 52 | 22934 | 9606 | gi\|94536842 | ribose 5-phosphate isomerase A (ribose 5-phosphate epimerase) [Homo sapiens] |
| 53 | 7170 | 9606 | gi\|114155146 | tropomyosin 3 isoform 3 [Homo sapiens] |
| 54 | 9726 | 9606 | gi\|215820619 | zinc finger protein 646 [Homo sapiens] |
| 55 | 89953 | 9606 | gi\|41871946 | kinesin-like 8 isoform a [Homo sapiens] |
| 56 | 88745 | 9606 | gi\|24308350 | hypothetical protein LOC88745 [Homo sapiens] |
| 57 | 64221 | 9606 | gi\|48476182 | roundabout, axon guidance receptor, homologue 3 [Homo sapiens] |
| 58 | 4594 | 9606 | gi\|156105689 | methylmalonyl Coenzyme A mutase precursor [Homo sapiens] |
| 59 | 23020 | 9606 | gi\|40217847 | activating signal cointegrator 1 complex subunit 3-like 1 [Homo sapiens] |
| 60 | 51287 | 9606 | gi\|46198304 | coiled-coil-helix-coiled-coil-helix domain containing 8 [Homo sapiens] |
| 61 | 51308 | 9606 | gi\|42476206 | receptor accessory protein 2 [Homo sapiens] |
| 62 | 7343 | 9606 | gi\|7657671 | upstream binding transcription factor, RNA polymerase I isoform a [Homo sapiens] |
| 63 | 6434 | 9606 | gi\|4759098 | splicing factor, arginine/serine-rich 10 [Homo sapiens] |
| 64 | 22920 | 9606 | gi\|18105054 | kinesin-associated protein 3 [Homo sapiens] |
| 65 | 83939 | 9606 | gi\|54873624 | eukaryotic translation initiation factor 2A [Homo sapiens] |
| 66 | 79363 | 9606 | gi\|241666479 | RecName: Full = Miro domain-containing protein C1orf89 |
| 67 | 476 | 9606 | gi\|21361181 | Na+/K+-ATPase alpha 1 subunit isoform a proprotein [Homo sapiens] |
| 68 | 27018 | 9606 | gi\|7657044 | nerve growth factor receptor (TNFRSF16) associated protein 1 isoform b [Homo sapiens] |
| 69 | 79891 | 9606 | gi\|190610006 | zinc finger protein 671 [Homo sapiens] |
| 70 | 57687 | 9606 | gi\|24308257 | vesicle amine transport protein 1 homologue (T. californica)-like [Homo sapiens] |
| 71 | 60528 | 9606 | gi\|145553959 | elaC homologue 2 [Homo sapiens] |
| 72 | 23608 | 9606 | gi\|223468622 | makorin, ring finger protein, 1, isoform CRA_e [Homo sapiens] |
| 73 | 3550 | 9606 | gi\|125988409 | RED protein [Homo sapiens] |
| 74 | 11188 | 9606 | gi\|66472382 | nischarin [Homo sapiens] |
| 75 | 4665 | 9606 | gi\|5174607 | NGFI-A binding protein 2 [Homo sapiens] |
| 76 | 5442 | 9606 | gi\|110618253 | mitochondrial DNA-directed RNA polymerase precursor [Homo sapiens] |
| 77 | 23246 | 9606 | gi\|21327667 | block of proliferation 1 [Homo sapiens] |
| 78 | 90326 | 9606 | gi\|42734379 | THAP domain containing, apoptosis associated protein 3 [Homo sapiens] |
| 79 | 3104 | 9606 | gi\|4885419 | zinc finger and BTB domain containing 48 [Homo sapiens] |
| 80 | 11332 | 9606 | gi\|32528286 | acyl-CoA thioesterase 7 isoform hBACHd [Homo sapiens] |
| 81 | 6837 | 9606 | gi\|19557695 | mediator complex subunit 22 isoform b [Homo sapiens] |
| 82 | 10290 | 9606 | gi\|157785645 | SPEG complex locus [Homo sapiens] |
| 83 | 347735 | 9606 | gi\|71834872 | tumor differentially expressed 2-like [Homo sapiens] |
| 84 | 10480 | 9606 | gi\|23397429 | eukaryotic translation initiation factor 3, subunit M [Homo sapiens] |
| 85 | 1028 | 9606 | gi\|169790899 | cyclin-dependent kinase inhibitor 1C isoform b [Homo sapiens] |
| 86 | 3275 | 9606 | gi\|46255047 | HMT1 hnRNP methyltransferase-like 1 [Homo sapiens] |
| 87 | 10574 | 9606 | gi\|58331185 | chaperonin containing TCP1, subunit 7 isoform b [Homo sapiens] |
| 88 | 57176 | 9606 | gi\|55741845 | valyl-tRNA synthetase 2, mitochondrial [Homo sapiens] |
| 89 | 9080 | 9606 | gi\|11141861 | claudin 9 [Homo sapiens] |
| 90 | 782 | 9606 | gi\|40804472 | calcium channel, voltage-dependent, beta 1 subunit isoform 3 [Homo sapiens] |
| 91 | 7812 | 9606 | gi\|56117850 | upstream of NRAS isoform 2 [Homo sapiens] |
| 92 | 1974 | 9606 | gi\|83700235 | eukaryotic translation initiation factor 4A2 [Homo sapiens] |
| 93 | 51629 | 9606 | gi\|219555665 | solute carrier family 25, member 39 isoform a [Homo sapiens] |
| 94 | 63893 | 9606 | gi\|192449449 | ubiquitin-conjugating enzyme E2O [Homo sapiens] |
| 95 | 51706 | 9606 | gi\|49574502 | NAD(P)H:quinone oxidoreductase type 3, polypeptide A2 [Homo sapiens] |
| 96 | 83986 | 9606 | gi\|14042970 | integrin alpha FG-GAP repeat containing 3 [Homo sapiens] |
| 97 | 1327 | 9606 | gi\|4502981 | cytochrome c oxidase subunit IV isoform 1 precursor [Homo sapiens] |
| 98 | 27339 | 9606 | gi\|7657381 | PRP19/PSO4 pre-mRNA processing factor 19 homologue [Homo sapiens] |
| 99 | 871 | 9606 | gi\|32454741 | serine (or cysteine) proteinase inhibitor, clade H, member 1 precursor [Homo sapiens] |
| 100 | 3679 | 9606 | gi\|193785653 | unnamed protein product [Homo sapiens] |
| 101 | 4357 | 9606 | gi\|61835204 | mercaptopyruvate sulfurtransferase isoform 2 [Homo sapiens] |
| 102 | 51466 | 9606 | gi\|7706687 | Enah/Vasp-like [Homo sapiens] |
| 103 | 2266 | 9606 | gi\|70906437 | fibrinogen, gamma chain isoform gamma-A precursor [Homo sapiens] |
| 104 | 7695 | 9606 | gi\|4507987 | zinc finger protein 136 [Homo sapiens] |
| 105 | 4043 | 9606 | gi\|4505021 | low density lipoprotein receptor-related protein associated protein 1 precursor [Homo sapiens] |
| 106 | 8321 | 9606 | gi\|4503825 | frizzled 1 [Homo sapiens] |
| 107 | 10539 | 9606 | gi\|95113651 | glutaredoxin 3 [Homo sapiens] |
| 108 | 79639 | 9606 | gi\|42734434 | transmembrane protein 53 [Homo sapiens] |
| 109 | 51117 | 9606 | gi\|166795285 | coenzyme Q4 homologue [Homo sapiens] |
| 110 | 10540 | 9606 | gi\|5453629 | dynactin 2 [Homo sapiens] |
| 111 | 7710 | 9606 | gi\|145977222 | zinc finger protein 154 [Homo sapiens] |
| 112 | 1778 | 9606 | gi\|33350932 | cytoplasmic dynein 1 heavy chain 1 [Homo sapiens] |
| 113 | 6155 | 9606 | gi\|4506623 | ribosomal protein L27 [Homo sapiens] |
| 114 | 8936 | 9606 | gi\|4507913 | Wiskott-Aldrich syndrome protein family member 1 [Homo sapiens] |
| 115 | 1211 | 9606 | gi\|115527060 | clathrin, light polypeptide A isoform c [Homo sapiens] |
| 116 | 6217 | 9606 | gi\|4506691 | ribosomal protein S16 [Homo sapiens] |
| 117 | 10991 | 9606 | gi\|5870893 | solute carrier family 38, member 3 [Homo sapiens] |
| 118 | 1466 | 9606 | gi\|4503101 | cysteine and glycine-rich protein 2 [Homo sapiens] |
| 119 | 5447 | 9606 | gi\|127139033 | cytochrome P450 reductase [Homo sapiens] |
| 120 | 23070 | 9606 | gi\|24307983 | FtsJ methyltransferase domain containing 2 [Homo sapiens] |
| 121 | 4627 | 9606 | gi\|12667788 | myosin, heavy polypeptide 9, non-muscle [Homo sapiens] |
| 122 | 6165 | 9606 | gi\|16117791 | ribosomal protein L35a [Homo sapiens] |
| 123 | 3945 | 9606 | gi\|4557032 | L-lactate dehydrogenase B [Homo sapiens] |
| 124 | 84707 | 9606 | gi\|14249132 | brain expressed X-linked 2 [Homo sapiens] |
| 125 | 2778 | 9606 | gi\|117938765 | GNAS complex locus isoform g [Homo sapiens] |
| 126 | 10472 | 9606 | gi\|19923354 | zinc finger protein 238 isoform 2 [Homo sapiens] |
| 128 | 53407 | 9606 | gi\|8394376 | syntaxin 18 [Homo sapiens] |
| 129 | 2664 | 9606 | gi\|4503971 | GDP dissociation inhibitor 1 [Homo sapiens] |
| 130 | 147015 | 9606 | gi\|146231950 | dehydrogenase/reductase (SDR family) member 13 [Homo sapiens] |
| 131 | 3150 | 9606 | gi\|48255933 | high-mobility group nucleosome binding domain 1, isoform CRA_a [Homo sapiens] |
| 132 | 4023 | 9606 | gi\|4557727 | lipoprotein lipase precursor [Homo sapiens] |
| 133 | 79002 | 9606 | gi\|13128992 | hypothetical protein MGC2803 [Homo sapiens] |
| 134 | 10383 | 9606 | gi\|5174735 | tubulin, beta, 2 [Homo sapiens] |
| 135 | 57649 | 9606 | gi\|75677357 | PHD finger protein 12 isoform 1 [Homo sapiens] |
| 136 | 5214 | 9606 | gi\|11321601 | phosphofructokinase, platelet [Homo sapiens] |
| 137 | 7102 | 9606 | gi\|21265104 | tetraspanin 7 [Homo sapiens] |
| 138 | 322 | 9606 | gi\|4502131 | amyloid beta A4 precursor protein-binding, family B, member 1 isoform E9 [Homo sapiens] |
| 139 | 27344 | 9606 | gi\|7019519 | proprotein convertase subtilisin/kexin type 1 inhibitor precursor [Homo sapiens] |
| 140 | 3799 | 9606 | gi\|4758648 | kinesin family member 5B [Homo sapiens] |
| 141 | 23406 | 9606 | gi\|21624607 | coactosin-like 1 [Homo sapiens] |
| 142 | 8405 | 9606 | gi\|4507183 | speckle-type POZ protein [Homo sapiens] |
| 143 | 51655 | 9606 | gi\|7706359 | RAS, dexamethasone-induced 1 [Homo sapiens] |
| 144 | 146909 | 9606 | gi\|122937289 | kinesin family member 18B [Homo sapiens] |
| 145 | 22883 | 9606 | gi\|57242755 | calsyntenin 1 isoform 2 [Homo sapiens] |
| 146 | 64951 | 9606 | gi\|15721937 | mitochondrial ribosomal protein S24 [Homo sapiens] |
| 147 | 51147 | 9606 | gi\|189083821 | inhibitor of growth family, member 4 isoform 9 [Homo sapiens] |
| 148 | 55079 | 9606 | gi\|157388917 | FEZ family zinc finger 2 [Homo sapiens] |
| 149 | 51529 | 9606 | gi\|18777675 | APC11 anaphase promoting complex subunit 11 isoform 2 [Homo sapiens] |
| 150 | 10376 | 9606 | gi\|57013276 | tubulin, alpha, ubiquitous [Homo sapiens] |
| 151 | 5223 | 9606 | gi\|4505753 | phosphoglycerate mutase 1 (brain) [Homo sapiens] |
| 152 | 3312 | 9606 | gi\|16041670 | Unknown (protein for IMAGE: 3906958) [Homo sapiens] |
| 153 | 147007 | 9606 | gi\|22748979 | transmembrane protein 199 [Homo sapiens] |
| 154 | 6861 | 9606 | gi\|92859638 | synaptotagmin V [Homo sapiens] |
| 155 | 6144 | 9606 | gi\|18104948 | ribosomal protein L21 [Homo sapiens] |
| 156 | 6129 | 9606 | gi\|15431301 | ribosomal protein L7 [Homo sapiens] |
| 157 | 51510 | 9606 | gi\|189409150 | chromatin modifying protein 5 [Homo sapiens] |
| 158 | 3925 | 9606 | gi\|5031851 | stathmin 1 [Homo sapiens] |
| 159 | 6125 | 9606 | gi\|14591909 | ribosomal protein L5 [Homo sapiens] |
| 160 | 4904 | 9606 | gi\|34098946 | nuclease sensitive element binding protein 1 [Homo sapiens] |
| 161 | 2495 | 9606 | gi\|56682959 | ferritin, heavy polypeptide 1 [Homo sapiens] |
| 162 | 4637 | 9606 | gi\|17986258 | myosin, light chain 6, alkali, smooth muscle and non-muscle isoform 1 [Homo sapiens] |
| 163 | 1953 | 9606 | gi\|110347457 | EGF-like-domain, multiple 3 [Homo sapiens] |
| 164 | 4926 | 9606 | gi\|71361682 | nuclear mitotic apparatus protein 1 [Homo sapiens] |
| 165 | 56654 | 9606 | gi\|9050060 | NPDC-1 [Homo sapiens] |
| 166 | 293 | 9606 | gi\|156071462 | solute carrier family 25, member A6 [Homo sapiens] |
| 167 | 8772 | 9606 | gi\|4505229 | Fas-associated via death domain [Homo sapiens] |
| 168 | 10101 | 9606 | gi\|6912540 | nucleotide binding protein 2 (MinD homolog, E. coli) [Homo sapiens] |
| 169 | 9230 | 9606 | gi\|190358517 | RAB11B, member RAS oncogene family [Homo sapiens] |
| 170 | 8775 | 9606 | gi\|47933379 | N-ethylmaleimide-sensitive factor attachment protein, alpha [Homo sapiens] |
| 171 | 7280 | 9606 | gi\|4507729 | tubulin, beta 2 [Homo sapiens] |
| 172 | 2131 | 9606 | gi\|46370066 | exostosin 1 [Homo sapiens] |
| 173 | 1915 | 9606 | gi\|4503471 | eukaryotic translation elongation factor 1 alpha 1 [Homo sapiens] |
| 174 | 79004 | 9606 | gi\|148596996 | CUE domain containing 2 [Homo sapiens] |
| 175 | 7846 | 9606 | gi\|17986283 | tubulin, alpha 1a [Homo sapiens] |
| 176 | 4150 | 9606 | gi\|110347461 | MYC-associated zinc finger protein isoform 1 [Homo sapiens] |

1-16. (canceled)

17. A method for identifying specific marker sequences for diagnosis of prostate cancer and/or for prognosis in prostate cancer, comprising the following steps:
a) selecting patients with prostate cancer and high inflammation values and/or patients with prostate cancer and low inflammation values,
b) determining the interaction of a sample from the selected patients with marker sequences to be tested, wherein the marker sequences to be tested are placed on a solid support,
c) selecting marker sequences that demonstrate an interaction, and
d) determining whether the selected marker sequences distinguish between progressive and non-progressive prostate cancer.

18. The method according to claim 17, wherein the selected marker sequences distinguish between progressive and non-progressive prostate cancer with high inflammation values.

19. The method according to claim 17, wherein the selected patients belong to the same population group.

20. The method according to claim 17, wherein the sample from the selected patients is a bodily fluid or a tissue sample, in particular blood, whole blood, blood plasma, blood serum, patient serum, urine, cerebrospinal fluid, or synovial fluid.

21. The method according to claim 17, wherein the marker sequences to be tested are selected from the group comprising SEQ ID No. 1-176 (proteins), SEQ ID No. 177-352 (DNA clone sequences) and SEQ ID No. 353-528 (related RNA sequences), partial sequences of SEQ ID No. 1-528 with at least 90%, preferably at least 95%, of the length of SEQ ID No. 1-528, and homologues of SEQ ID No. 1-528 with an identity of at least 95%, preferably at least 98% or more, to the corresponding marker sequences, and partial sequences of the homologues of SEQ ID No. 1-528 with at least 90%, preferably at least 95%, of the length of SEQ ID No. 1-528.

22. The method according to claim 17, wherein the marker sequences to be tested are presented on a protein microarray.

23. Use of one or more specific marker sequences attainable by a method according to claim 17 for diagnosis of prostate cancer, preferably for diagnosis of prostate carcinoma.

24. Use of one or more specific marker sequences attainable by a method according to claim 17 for prognosis in prostate cancer and/or for stratification, in particular for risk stratification or for therapy control in prostate cancer.

25. Use of SPOP and/or partial sequences and/or homologues of SPOP and/or of STX18 and/or partial sequences and/or homologues of STX18 and/or of SPAST and/or partial sequences and/or homologues of SPAST for diagnosis of prostate cancer and/or for prognosis in prostate cancer and/or for stratification in prostate cancer.

26. An arrangement of specific marker sequences for diagnosis of prostate cancer and/or prognosis in prostate cancer and/or for stratification in prostate cancer, comprising one or more specific marker sequences obtainable by a method according to claim 17.

27. The arrangement according to claim 26, wherein the specific marker sequences are selected from the group comprising SEQ ID No 1-176 (proteins), SEQ ID No. 177-352 (DNA clone sequences) and SEQ ID No. 353-528 (related RNA sequences), partial sequences of SEQ ID No. 1-528 with at least 90%, preferably at least 95%, of the length of SEQ ID No. 1-528, and homologues of SEQ ID No. 1-528 with an identity of at least 95%, preferably at least 98% or more, to the corresponding marker sequences, and partial sequences of the homologues of SEQ ID No. 1-528 with at least 90%, preferably at least 95%, of the length of SEQ ID No. 1-528.

28. The arrangement according to claim 26, wherein the specific marker sequences are selected from SPOP and/or partial sequences of SPOP and/or homologues of SPOP and/or STX18 and/or partial sequences of STX18 and/or homologues of STX18 and/or SPAST and/or partial sequences of SPAST and/or homologues of SPAST.

29. An assay or protein microarray comprising an arrangement of specific marker sequences according to claim 26 on a solid support and optionally further additives and excipients.

30. Use of an arrangement according to claim 26 for the identification and characterisation of a substance for prostate cancer, in particular a prostate carcinoma-containing agent for the detection of binding success, wherein a) the arrangement or the assay is brought into contact with at least one substance to be tested, and b) binding success is detected.

31. A diagnostic agent for diagnosis of prostate cancer and/or prognosis in prostate cancer, comprising an arrangement according to claim 26 and/or selected from the group of specific marker sequences SEQ ID No 1-176 (proteins), SEQ ID No. 177-352 (DNA clone sequences) and SEQ ID No. 353-528 (related RNA sequences), partial sequences of SEQ ID No. 1-528 with at least 90%, preferably at least 95%, of the length of SEQ ID No. 1-528, and homologues of SEQ ID No. 1-528 with an identity of at least 95%, preferably at least 98% or more, to the corresponding marker sequences, and partial sequences of the homologues of SEQ ID No. 1-528 with at least 90%, preferably at least 95%, of the length of SEQ ID No. 1-528.

32. A diagnostic agent for diagnosis of prostate cancer and/or prognosis in prostate cancer, comprising one or more specific marker sequences obtainable by a method according to claim 17 and/or selected from the group of specific marker sequences SEQ ID No 1-176 (proteins), SEQ ID No. 177-352 (DNA clone sequences) and SEQ ID No. 353-528 (related RNA sequences), partial sequences of SEQ ID No. 1-528 with at least 90%, preferably at least 95%, of the length of SEQ ID No. 1-528, and homologues of SEQ ID No. 1-528 with an identity of at least 95%, preferably at least 98% or more, to the corresponding marker sequences, and partial sequences of the homologues of SEQ ID No. 1-528 with at least 90%, preferably at least 95%, of the length of SEQ ID No. 1-528.

33. A kit for diagnosis or prognosis or stratification of prostate cancer diseases containing one or more specific marker sequences obtainable by a method according to claim 17 and/or one or more of the marker sequences selected from the group comprising SEQ ID No. 1-176 (proteins), SEQ ID No. 177-352 (DNA clone sequences) and SEQ ID No. 353-528 (related RNA sequences), partial sequences of SEQ ID No. 1-528 with at least 90%, preferably at least 95%, of the length of SEQ ID No. 1-528, and homologues of SEQ ID No. 1-528 with an identity of at least 95%, preferably at least 98% or more, to the corresponding marker sequences, and partial sequences of the homologues of SEQ ID No. 1-528 with at least 90%, preferably at least 95%, of the length of SEQ ID No. 1-528.

The application's sequence listing, which the Patent Office published only in electronic form, follows.

SEQUENCE LISTING (528 sequences)

SEQ ID NO: 1 - protein, 449 aa, Homo Sapiens
MEFFISMSETIKYNDDDHKTLFLKTLNEQRLEGEFCDIAIVVEDVKFRAHRCVLAACSTYFKKLFKKLEVDSSSVIEIDFLRSDIFEEVLNYMYTAKISVKKEDVNLMMSSGQILGIRFLDKLCSQKRDVSSPDENNGQSKSKYCLKINRPIGDAADTQDDDVEEIGDQDDSPSDDTVEGTPPSQEDGKSPTTTLRVQEAILKELGSEEVRKVNCYGQEVESMETPESKDLGSQTPQALTFNDGMSEVKDEQTPGWTTAASDMKFEYLLYGHHREQIACQACGKTFSDEGRLRKHEKLHTADRPFVCEMCTKGFTTQAHLKEHLKIHTGYKPYSCEVCGKSFIRAPDLKKHERVHSNERPFACHMCDKAFKHKSHLKDHERRHRGEKPFVCGSCTKAFAKASDLKRHENNMHSERKQVTPSAIQSETEQLQAAAMAAEAEQQLETIACS

SEQ ID NO: 2 - protein, 1556 aa, Homo Sapiens
MASELGARDDGGCTELAKPLYLQYLERALRLDHFLRQTSAIFNRNISSDDSEDGLDDSNPLLPQSGDPLIQVKEEPPNSLLGETSGAGSSGMLNTYSLNGVLQSESKCDKGNLYNFSKLKKSRKWLKSILLSDESSEADSQSEDDDEEELNLSREELHNMLRLHKYKKLHQNKYSKDKELQQYQYYSAGLLSTYDPFYEQQRHLLGPKKKKFKEEKKLKAKLKKVKKKRRRDEELSSEESPRRHHHQTKVFAKFSHDAPPPGTKKKHLSIEQLNARRRKVWLSIVKKELPKANKQKASARNLFLTNSRKLAHQCMKEVRRAALQAQKNCKETLPRARRLTKEMLLYWKKYEKVEKEHRKRAEKEALEQRKLDEEMREAKRQQRKLNFLITQTELYAHFMSRKRDMGHDGIQEEILRKLEDSSTQRQIDIGGGVVVNITQEDYDSNHFKAQALKNAENAYHIHQARTRSFDEDAKESRAAALRAANKSGTGFGESYSLANPSIRAGEDIPQPTIFNGKLKGYQLKGMNWLANLYEQGINGILADEMGLGKTVQSIALLAHLAERENIWGPFLIISPASTLNNWHQEFTRFVPKFKVLPYWGNPHDRKVIRRFWSQKTLYTQDAPFHVVITSYQLVVQDVKYFQRVKWQYMVLDEAQALKSSSSVRWKILLQFQCRNRLLLTGTPIQNTMAELWALLHFIMPTLFDSHEEFNEWFSKDIESHAENKSAIDENQLSRLHMILKPFMLRRIKKDVENELSDKIEILMYCQLTSRQKLLYQALKNKISIEDLLQSSMGSTQQAQNTTSSLMNLVMQFRKVCNHPELFERQETWSPFHISLKPYHISKFIYRHGQIRVFNHSRDRWLRVLSPFAPDYIQRSLFHRKGINEESCFSFLRFIDISPAEMANLMLQGLLARWLALFLSLKASYRLHQLRSWGAPEGESHQRYLRNKDFLLGVNFPLSFPNLCSCPLLKSLVFSSHCKAVSGYSDQVVHQRRSATSSLRRCLLTELPSFLCVASPRVTAVPLDSYCNDRSAEYERRVLKEGGSLAAKQCLLNGAPELAADWLNRRSQFFPEPAGGLWSIRPQNGWSFIRIPGKESLITDSGKLYALDVLLTRLKSQGHRVLIYSQMTRMIDLLEEYMVYRKHTYMRLDGSSKISERRDMVADFQNRNDIFVFLLSTRAGGLGINLTAADTVIFYDSDWNPTVDQQAMDRAHRLGQTKQVTVYRLICKGTIEERILQRAKEKSEIQRMVISGGNFKPDTLKPKEVVSLLLDDEELEKKLRLRQEEKRQQEETNRVKERKRKREKYAEKKKKEDELDGKRRKEGVNLVIPFVPSADNSNLSADGDDSFISVDSAMPSPFSEISISSELHTGSIPLDESSSDMLVIVDDPASSAPQSRATNSPASITGSVSDTVNGISIQEMPAAGRGHSARSRGRPKGSGSTAKGAGKGRSRKSTAGSAAAMAGAKAGAAAASAAAYAAYGYNVSKGISASSPLQTSLVRPAGLADFGPSSASSPLSSPLSKGNNVPGNPKNLHMTSSLAPDSLVRKQGKGTNPSGGR

SEQ ID NO: 3 - protein, 731 aa, Homo Sapiens
MVKPKYKGRSTINPSKASTNPDRVQGAGGQNMRDRATIRRLNMYRQKERRNSRGKIIKPLQYQSTVASGTVARVEPNIKWFGNTRVIKQSSLQKFQEEMDTVMKDPYKVVMKQSKLPMSLLHDRIRPHNLKVHILDTESFETTFGPKSQRKRPNLFASDMQSLIENAEMSTESYDQGKDRDLVTEDTGVRNEAQEEIYKKGQSKRIWGELYKVIDSSDVVVQVLDARDPMGTRSPHIETYLKKEKPWKHLIFVLNKCDLVPTWATKRWVAVLSQDYPTLAFHASLTNPFGKGAFIQLLRQFGKLHTDKKQISVGFIGYPNVGKSSVINTLRSKKVCNVAPIAGETKVWQYITLMRRIFLIDCPGVVYPSEDSETDIVLKGVVQVEKIKSPEDHIGAVLERAKPEYISKTYKIDSWENAEDFLEKLAFRTGKLLKGGEPDLQTVGKMVLNDWQRGRIPFFVKPPNAEPLVAPQLLPSSSLEVVPEAAQNNPGEEVTETAGEGSESIIKEETEENSHCDANTEMQQILTRVRQNFGKINVVPQFSGDDLVPVEVSDLEEELESFSDEEEEEQEQQRDDAEESSSEPEEENVGNDTKAVIKALDEKIAKYQKFLDKAKAKKFSAVRISKGLSEKIFAKPEEQRKTLEEDVDDRAPSKKGKKRKAQREEEQEHSNKAPRALTSKERRRAVRQQRPKKVGVRYYETHNVKNRNRNKKKTNDSEGQKHKRKKFRQKQ

SEQ ID NO: 4 - protein, 126 aa, Homo Sapiens
MPFFGNTFSPKKTPPRKSASLSNLHSLDRSTREVELGLEYGSPTMNLAGQSLKFENGQWIAETGVSGGVDRREVQRLRRRNQQLEEENNLLRLKVDILLDMLSESTAESHLMEKELDELRISRKRK

SEQ ID NO: 5 - protein, 391 aa, Homo Sapiens
MPGPQGGRGAATMSLGKLSPVGWVSSSQGKRRLTADMISHPLGDFRHTMHVGRGGDVFGDTSFLSNHGGSSGSTHRSPRSFLAKKLQLVRRVGAPPRRMASPPAPSPAPPAISPIIKNAISLPQLNQAAYDSLVVGKLSFDSSPTSSTDGHSSYGLDSGFCTISRLPRSEKPHDRDRDGSFPSEPGLRRSDSLLSFRLDLDLGPSLLSELLGVMSLPEAPAAETPAPAANPPAPTANPTGPAANPPATTANPPAPAANPSAPAATPTGPAANPPAPAASSTPHGHCPNGVTAGLGPVAEVKSSPVGGGPRGPAGPALGRHWGAGWDGGHHYPEMDARQERVEVLPQARASWESLDEEWRAPQAGSRTPVPSTVQANTFEFADAEEDDEVKV

SEQ ID NO: 6 - protein, 494 aa, Homo Sapiens
MFEIKKICCIGAGYVGGPTCSVIAHMCPEIRVTVVDVNESRINAWNSPTLPIYEPGLKEVVESCRGKNLFFSTNIDDAIKEADLVFISVNTPTKTYGMGKGRAADLKYIEACARRIVQNSNGYKIVTEKSTVPVRAAESIRRIFDANTKPNLNLQVLSNPEFLAEGTAIKDLKNPDRVLIGGDETPEGQRAVQALCAVYEHWVPREKILTTNTWSSELSKLAANAFLAQRISSINSISALCEATGADVEEVATAIGMDQRIGNKFLKASVGFGGSCFQKDVLNLVYLCEALNLPEVARYWQQVIDMNDYQRRRFASRIIDSLFNTVTDKKIAILGFAFKKDTGDTRESSSIYISKYLMDEGAHLHIYDPKVPREQIVVDLSHPGVSEDDQVSRLVTISKDPYEACDGAHAVVICTEWDMFKELDYERIHKKMLKPAFIFDGRRVLDGLHNELQTIGFQIETIGKKVSSKRIPYAPSGEIPKFSLQDPPNKKPKV

SEQ ID NO: 7 - protein, 421 aa, Homo Sapiens
MYAFVRFLEDNVCYALPVSCVRDFSPRSRLDFDNQKVYAVYRGPEELGAGPESPPRAPRDWGALLLHKAQILALAEDKSDLENSVMQKKIKIPKLSLNHVEEDGEVKDYGEEDLQLRHIKRPEGRKPSEVAHKSIEAVVARLEKQNGLSLGHSTCPEEVFVEASPGTEDMDSLEDAVVPRALYEELLRNYQQQQEEMRHLQQELERTRRQLVQQAKKLKEYGALVSEMKELRDLNRRLQDVLLLRLGSGPAIDLEKVKSECLEPEPELRSTFSEEANTSSYYPAPAPVMDKYILDNGKVHLGSGIWVDEEKWHQLQVTQGDSKYTKNLAVMIWGTDVLKNRSVTGVATKKKKDAVPKPPLSPHKLSIVRECLYDRIAQETVDETEIAQRLSKVNKYICEKIMDINKSCKNEERREAKYNLQ

SEQ ID NO: 8 - protein, 677 aa, Homo Sapiens
MDFPGHFEQIFQQLNYQRLHGQLCDCVIVVGNRHFKAHRSVLAACSTHFRALFSVAEGDQTMNMIQLDSEVVTAEAFAALIDMMYTSTLMLGESNVMDVLLAASHLHLNSVVKACKHYLTTRTLPMSPPSERVQEQSARMQRSFMLQQLGLSIVSSALNSSQNGEEQPAPMSSSMRSNLDQRTPFPMRRLHKRKQSAEERARQRLRPSIDESAISDVTPENGPSGVHSREEFFSPDSLKIVDNPKADGMTDNQEDSAIMFDQSFGTQEDAQVPSQSDNSAGNMAQLSMASRATQVETSFDQEAAPEKSSFQCENPEVGLGEKEHMRVVVKSEPLSSPEPQDEVSDVTSQAEGSESVEVEGVVVSAEKIDLSPESSDRSFSDPQSSTDRVGDIHILEVTNNLEHKSTFSISNFLNKSRGNNFTANQNNDDNIPNTTSDCRLESEAPYLLSPEAGPAGGPSSAPGSHVENPFSEPADSHFVRPMQEVMGLPCVQTSGYQGGEQFGMDFSRSGLGLHSSFSRVMIGSPRGGASNFPYYRRIAPKMPVVTSVRSSQIPENSTSSQLMMNGATSSFENGHPSQPGPPQLTRASADVLSKCKKALSEHNVLVVEGARKYACKICCKTFLTLTDCKKHIRVHTGEKPYACLKCGKRFSQSSHLYKHSKTTCLRWQSSNLPSTLL

SEQ ID NO: 9 - protein, 106 aa, Homo Sapiens
MVNVPKTRRTFCKKCGKHQPHKVTQYKKGKDSLYAQGRRRYDRKQSGYGGQTKPIFRKKAKTTKKIVLRLECVEPNCRSKRMLAIKRCKHFELGGDKKRKGQVIQF

SEQ ID NO: 10 - protein, 216 aa, Homo Sapiens
MAGRGGAARPNGPAAGNKICQFKLVLLGESAVGKSSLVLRFVKGQFHEYQESTIGAAFLTQTVCLDDTTVKFEIWDTAGQERYHSLAPMYYRGAQAAIVVYDITNTDTFARAKNWVKELQRQASPNIVIALAGNKADLASKRAVEFQEAQAYADDNSLLFMETSAKTAMNVNEIFMAIAKKLPKNEPQNATGAPGRNRGVDLQENNPASRSQCCSN

SEQ ID NO: 11 - protein, 1153 aa, Homo Sapiens
MACPWKFLFKTKFHQYAMNGEKDINNNVEKAPCATSSPVTQDDLQYHNLSKQQNESPQPLVETGKKSPESLVKLDATPLSSPRHVRIKNWGSGMTFQDTLHHKAKGILTCRSKSCLGSIMTPKSLTRGPRDKPTPPDELLPQAIEFVNQYYGSFKEAKIEEHLARVEAVTKEIETTGTYQLTGDELIFATKQAWRNAPRCIGRIQWSNLQVFDARSCSTAREMFEHICRHVRYSTNNGNIRSAITVFPQRSDGKHDFRVWNAQLIRYAGYQMPDGSIRGDPANVEFTQLCIDLGWKPKYGRFDVVPLVLQANGRDPELFEIPPDLVLEVAMEHPKYEWFRELELKWYALPAVANMLLEVGGLEFPGCPFNGWYMGTEIGVRDFCDVQRYNILEEVGRRMGLETHKLASLWKDQAVVEINIAVLHSFQKQNVTIMDHHSAAESFMKYMQNEYRSRGGCPADWIWLVPPMSGSITPVFHQEMLNYVLSPFYYYQVEAWKTHVWQDEKRRPKRREIPLKVLVKAVLFACMLMRKTMASRVRVTILFATETGKSEALAWDLGALFSCAFNPKVVCMDKYRLSCLEEERLLLVVTSTFGNGDCPGNGEKLKKSLFMLKELNNKFRYAVFGLGSSMYPRFCAFAHDIDQKLSHLGASQLTPMGEGDELSGQEDAFRSWAVQTFKAACETFDVRGKQHIQIPKLYTSNVTWDPHHYRLVQDSQPLDLSKALSSMHAKNVFTMRLKSRQNLQSPTSSRATILVELSCEDGQGLNYLPGEHLGVCPGNQPALVQGILERVVDGPTPHQTVRLEALDESGSYWVSDKRLPPCSLSQALTYFLDITTPPTQLLLQKLAQVATEEPERQRLEALCQPSEYSKWKFTNSPTFLEVLEEFPSLRVSAGFLLSQLPILKPRFYSISSSRDHTPTEIHLTVAVVTYHTRDGQGPLHHGVCSTWLNSLKPQDPVPCFVRNASGFHLPEDPSHPCILIGPGTGIAPFRSFWQQRLHDSQHKGVRGGRMTLVFGCRRPDEDHIYQEEMLEMAQKGVLHAVHTAYSRLPGKPKVYVQDILRQQLASEVLRVLHKEPGHLYVCGDVRMARDVAHTLKQLVAAKLKLNEEQVEDYFFQLKSQKRYHEDIFGAVFPYEAKKDRVAVQPSSLEMSAL

SEQ ID NO: 12 - protein, 1217 aa, Homo Sapiens
MYIKQVIIQGFRSYRDQTIVDPFSSKHNVIVGRNGSGKSNFFYAIQFVLSDEFSHLRPEQRLALLHEGTGPRVISAFVEIIFDNSDNRLPIDKEEVSLRRVIGAKKDQYFLDKKMVTKNDVMNLLESAGFSRSNPYYIVKQGKINQMATAPDSQRLKLLREVAGTRVYDERKEESISLMKETEGKREKINELLKYIEERLHTLEEEKEELAQYQKWDKMRRALEYTIYNQELNETRAKLDELSAKRETSGEKSRQLRDAQQDARDKMEDIERQVRELKTKISAMKEEKEQLSAERQEQIKQRTKLELKAKDLQDELAGNSEQRKRLLKERQKLLEKIEEKQKELAETEPKFNSVKEKEERGIARLAQATQERTDLYAKQGRGSQFTSKEERDKWIKKELKSLDQAINDKKRQIAAIHKDLEDTEANKEKNLEQYNKLDQDLNEVKARVEELDRKYYEVKNKKDELQSERNYLWREENAEQQALAAKREDLEKKQQLLRAATGKAILNGIDSINKVLDHFRRKGINQHVQNGYHGIVMNNFECEPAFYTCVEVTAGNRLFYHIVDSDEVSTKILMEFNKMNLPGEVTFLPLNKLDVRDTAYPETNDAIPMISKLRYNPRFDKAFKHVFGKTLICRSMEVSTQLARAFTMDCITLEGDQVSHRGALTGGYYDTRKSRLELQKDVRKAEEELGELEAKLNENLRRNIERINNEIDQLMNQMQQIETQQRKFKASRDSILSEMKMLKEKRQQSEKTFMPKQRSLQSLEASLHAMESTRESLKAELGTDLLSQLSLEDQKRVDALNDEIRQLQQENRQLLNERIKLEGIITRVETYLNENLRKRLDQVEQELNELRETEGGTVLTATTSELEAINKRVKDTMARSEDLDNSIDKTEAGIKELQKSMERWKNMEKEHMDAINHDTKELEKMTNRQGMLLKKKEECMKKIRELGSLPQEAFEKYQTLSLKQLFRKLEQCNTELKKYSHVNKKALDQFVNFSEQKEKLIKRQEELDRGYKSIMELMNVLELRKYEAIQLTFKQVSKNFSEVFQKLVPGGKATLVMKKGDVEGSQSQDEGEGSGESERGSGSQSSVPSVDQFTGVGIRVSFTGKQGEMREMQQLSGGQKSLVALALIFAIQKCDPAPFYLFDEIDQALDAQHRKAVSDMIMELAVHAQFITTTFRPELLESADKFYGVKFRNKVSHIDVITAEMAKDFVEDDTTHG

SEQ ID NO: 13 - protein, 314 aa, Homo Sapiens
MGLEAARELECAALGTLLRDPREAERTLLLDCRPFLAFCRRHVRAARPVPWNALLRRRARGPPAAVLACLLPDRALRTRLVRGELARAVVLDEGSASVAELRPDSPAHVLLAALLHETRAGPTAVYFLRGGFDGFQGCCPDLCSEAPAPALPPTGDKTSRSDSRAPVYDQGGPVEILPYLFLGSCSHSSDLQGLQACGITAVLNVSASCPNHFEGLFRYKSIPVEDNQMVEISAWFQEAIGFIDWVKNSGGRVLVHCQAGISRSATICLAYLMQSRRVRLDEAFDFVKQRRGVISPNFSFMGQLLQFETQVLCH

SEQ ID NO: 14 - protein, 348 aa, Homo Sapiens
MAAGVAGWGVEAEEFEDAPDVEPLEPTLSNIIEQRSLKWIFVGGKGGVGKTTCSCSLAVQLSKGRESVLIISTDPAHNISDAFDQKFSKVPTKVKGYDNLFAMEIDPSLGVAELPDEFFEEDNMLSMGKKMMQEAMSAFPGIDEAMSYAEVMRLVKGMNFSVVVFDTAPTGHTLRLLNFPTIVERGLGRLMQIKNQISPFISQMCNMLGLGDMNADQLASKLEETLPVIRSVSEQFKDPEQTTFICVCIAEFLSLYETERLIQELAKCKIDTHNIIVNQLVFPDPEKPCKMCEARHKIQAKYLDQMEDLYEDFHIVKLPLLPHEVRGADKVNTFSALLLEPYKPPSAQ

SEQ ID NO: 15 - protein, 194 aa, Homo Sapiens
MEEKLKKTKIIFVVGGPGSGKGTQCEKIVQKYGYTHLSTGDLLRSEVSSGSARGKKLSEIMEKGQLVPLETVLDMLRDAMVAKVNTSKGFLIDGYPREVQQGEEFERRIGQPTLLLYVDAGPETMTQRLLKRGETSGRVDDNEETIKKRLETYYKATEPVIAFYEKRGIVRKVNAEGSVDSVFSQVCTHLDALK

SEQ ID NO: 16 - protein, 500 aa, Homo Sapiens
MNQRRSESRPGNHRLQAYAEPGKGDSGGAGPLSGSARRGRGGGGAIRVRRPCWSGGAGRGGGPAWAVRLPTVTAGWTWPALRTLSSLRAGPSEPHSPGRRPPRAGRPLCQADPQPGKAARRSLEPDPAQTGPRPARAAGMSEARKGPDEAEESQYDSGIESLRSLRSLPESTSAPASGPSDGSPQPCTHPPGPVKEPQEKEDADGERADSTYGSSSLTYTLSLLGGPEAEDPAPRLPLPHVGALSPQQLEALTYISEDGDTLVHLAVIHEAPAVLLCCLALLPQEVLDIQNNLYQTALHLAVHLDQPGAVRALVLKGASRALQDRHGDTALHVACQRQHLACARCLLEGRPEPGRGTSHSLDLQLQNWQGLACLHIATLQKNQPLMELLLRNGADIDVQEGTSGKTALHLAVETQERGLVQFLLQAGAQVDARMLNGCTPLHLAAGRGLMGISSTLCKAGADSLLRNVEDETPQDLTEESLVLLPFDDLKISGKLLLCTD

SEQ ID NO: 17 - protein, 1258 aa, Homo Sapiens
MITSELPVLQDSTNETTAHSDAGSELEETEVKGKRKRGRPGRPPSTNKKPRKSPGEKSRIEAGIRGAGRGRANGHPQQNGEGEPVTLFEVVKLGKSAMQSVVDDWIESYKQDRDIALLDLINFFIQCSGCRGTVRIEMFRNMQNAEIIRKMTEEFDEDSGDYPLTMPGPQWKKFRSNFCEFIGVLIRQCQYSIIYDEYMMDTVISLLTGLSDSQVRAFRHTSTLAAMKLMTALVNVALNLSIHQDNTQRQYEAERNKMIGKRANERLELLLQKRKELQENQDEIENMMNSIFKGIFVHRYRDAIAEIRAICIEEIGVWMKMYSDAFLNDSYLKYVGWTLHDRQGEVRLKCLKALQSLYTNRELFPKLELFTNRFKDRIVSMTLDKEYDVAVEAIRLVTLILHGSEEALSNEDCENVYHLVYSAHRPVAVAAGEFLHKKLFSRHDPQAEEALAKRRGRNSPNGNLIRMLVLFFLESELHEHAAYLVDSLWESSQELLKDWECMTELLLEEPVQGEEAMSDRQESALIELMVCTIRQAAEAHPPVGRGTGKRVLTAKERKTQIDDRNKLTEHFIITLPMLLSKYSADAEKVANLLQIPQYFDLEIYSTGRMEKHLDALLKQIKFVVEKHVESDVLEACSKTYSILCSEEYTIQNRVDIARSQLIDEFVDRFNHSVEDLLQEGEEADDDDIYNVLSTLKRLTSFHNAHDLTKWDLFGNCYRLLKTGIEHGAMPEQIVVQALQCSHYSILWQLVKITDGSPSKEDLLVLRKTVKSFLAVCQQCLSNVNTPVKEQAFMLLCDLLMIFSHQLMTGGREGLQPLVFNPDTGLQSELLSFVMDHVFIDQDEENQSMEGDEEDEANKIEALHKRRNLLAAFSKLIIYDIVDMHAAADIFKHYMKYYNDYGDIIKETLSKTRQIDKIQCAKTLILSLQQLFNELVQEQGPNLDRTSAHVSGIKELARRFALTFGLDQIKTREAVATLHKDGIEFAFKYQNQKGQEYPPPNLAFLEVLSEFSSKLLRQDKKTVHSYLEKFLTEQMMERREDVWLPLISYRNSLVTGGEDDRMSVNSGSSSSKTSSVRNKKGRPPLHKKRVEDESLDNTWLNRTDTMIQTPGPLPAPQLTSTVLRENSRPMGDQIQEPESEHGSEPDFLHNPQMQISWLGQPKLEDLNRKDRTGMNYMKVRTGVRHAVRGLMEEDAEPIFEDVMMSSRSQLEDMNEEFEDTMVIDLPPSRNRRERAELRPDFFDSAAIIEDDSGFGMPMF

SEQ ID NO: 18 - protein, 282 aa, Homo Sapiens
MALKQISSNKCFGGLQKVFEHDSVELNCKMKFAVYLPPKAETGKCPALYWLSGLTCTEQNFISKSGYHQSASEHGLVVIAPDTSPRGCNIKGEDESWDFGTGAGFYVDATEDPWKTNYRMYSYVTEELPQLINANFPVDPQRMSIFGHSMGGHGALICALKNPGKYKSVSAFAPICNPVLCPWGKKAFSGYLGTDQSKWKAYDATHLVKSYPGSQLDILIDQGKDDQFLLDGQLLPDNFIAACTEKKIPVVFRLQEGYDHSYYFIATFITDHIRHHAKYLNA

SEQ ID NO: 19 - protein, 894 aa, Homo Sapiens
MNQIEPGVQYNYVYDEDEYMIQEEEWDRDLLLDPAWEKQQRKTFTAWCNSHLRKAGTQIENIEEDFRNGLKLMLLLEVISGERLPKPDRGKMRFHKIANVNKALDYIASKGVKLVSIGAEEIVDGNVKMTLGMIWTIILRFAIQDISVEETSAKEGLLLWCQRKTAPYRNVNIQNFHTSWKDGLGLCALIHRHRPDLIDYSKLNKDDPIGNINLAMEIAEKHLDIPKMLDAEDIVNTPKPDERAIMTYVSCFYHAFAGAEQAETAANRICKVLAVNQENERLMEEYERLASELLEWIRRTIPWLENRTPEKTMQAMQKKLEDFRDYRRKHKPPKVQEKCQLEINFNTLQTKLRISNRPAFMPSEGKMVSDIAGAWQRLEQAEKGYEEWLLNEIRRLERLEHLAEKFRQKASTHETWAYGKEQILLQKDYESASLTEVRALLRKHEAFESDLAAHQDRVEQIAAIAQELNELDYHDAVNVNDRCQKICDQWDRLGTLTQKRREALERMEKLLETIDQLHLEFAKRAAPFNNWMEGAMEDLQDMFIVHSIEEIQSLITAHEQFKATLPEADGERQSIMAIQNEVEKVIQSYNIRISSSNPYSTVTMDELRTKWDKVKQLVPIRDQSLQEELARQHANERLRRQFAAQANAIGPWIQNKMEEIARSSIQITGALEDQMNQLKQYEHNIINYKNNIDKLEGDHQLIQEALVFDNKHTNYTMEHIRVGWELLLTTIARTINEVETQILTRDAKGITQEQMNEFRASFNHFDRRKNGLMDHEDFRACLISMGYDLGEAEFARIMTLVDPNGQGTVTFQSFIDFMTRETADTDTAEQVIASFRILASDKPYILAEELRRELPPDQAQYCIKRMPAYSGPGSVPGALDYAAFSSALYGESDL

SEQ ID NO: 20 - protein, 589 aa, Homo Sapiens
MYRWLVRILGTIFRFCDRSVPPARALLKRRRSDSTLFSTVDTDEIPAKRPRLDCFIHQVKNSLYNAASLFGFPFQLTTKPMVTSACNGTRNVAPSGEVFSNSSSCELTGSGSWNNMLKLGNKSPNGISDYPKIRVTVTRDQPRRVLPSFGFTLNSEGCNRRPGGRRHSKGNPESSLMWKPQEQAVTEMISEESGKGLRRPHCTVEEGVQKEEREKYRKLLERLKESGHGNSVCPVTSNYHSSQRSQMDTLKTKGWGEEQNHGVKTTQFVPKQYRLVETRGPLCSLRSEKRCSKGKITDTETMVGIRFENESRRGYQLEPDLSEEVSARLRLGSGSNGLLRRKVSIIETKEKNCSGKERDRRTDDLLELTEDMEKEISNALGHGPQDEILSSAFKLRITRGDIQTLKNYHWLNDEVINFYMNLLVERNKKQGYPALHVFSTFFYPKLKSGGYQAVKRWTKGVNLFEQEIILVPIHRKVHWSLVVIDLRKKCLKYLDSMGQKGHRICEILLQYLQDESKTKRNSDLNLLEWTHHSMKPHEIPQQLNGSDCGMFTCKYADYISRDKPITFTQHQMPLFRKKMVWEILHQQLL

SEQ ID NO: 21 - protein, 440 aa, Homo Sapiens
MMADEEEEVKPILQKLQELVDQLYSFRDCYFETHSVEDAGRKQQDVQKEMEKTLQQMEEVVGSVQGKAQVLMLTGKALNVTPDYSPKAEELLSKAVKLEPELVEAWNQLGEVYWKKGDVAAAHTCFSGALTHCRNKVSLQNLSMVLRQLRTDTEDEHSHHVMDSVRQAKLAVQMDVHDGRSWYILGNSYLSLYFSTGQNPKISQQALSAYAQAEKVDRKASSNPDLHLNRATLHKYEESYGEALEGFSRAAALDPAWPEPRQREQQLLEFLDRLTSLLESKGKVKTKKLQSMLGSLRPAHLGPCSDGHYQSASGQKVTLELKPLSTLQPGVNSGAVILGKVVFSLTTEEKVPFTFGLVDSDGPCYAVMVYNIVQSWGVLIGDSVAIPEPNLRLHRIQHKGKDYSFSSVRVETPLLLVVNGKPQGSSSQAVATVASRPQCE

SEQ ID NO: 22 - protein, 283 aa, Homo Sapiens
MCNTPTYCDLGKAAKDVFNKGYGFGMVKIDLKTKSCSGVEFSTSGHAYTDTGKASGNLETKYKVCNYGLTFTQKWNTDNTLGTEISWENKLAEGLKLTLDTIFVPNTGKKSGKLKASYKRDCFSVGSNVDIDFSGPTIYGWAVLAFEGWLAGYQMSFDTAKSKLSQNNFALGYKAADFQLHTHVNDGTEFGGSIYQKVNEKIETSINLAWTAGSNNTRFGIAAKYMLDCRTSLSAKVNNASLIGLGYTQTLRPGVKLTLSALIDGKNFSAGGHKVGLGFELEA

SEQ ID NO: 23 - protein, 387 aa, Homo Sapiens
MACTIQKAEALDGAHLMQILWYDEEESLYPAVWLRDNCPCSDCYLDSAKARKLLVEALDVNIGIKGLIFDRKKVYITWPDEHYSEFQADWLKKRCFSKQARAKLQRELFFPECQYWGSELQLPTLDFEDVLRYDEHAYKWLSTLKKVGIVRLTGASDKPGEVSKLGKRMGFLYLTFYGHTWQVQDKIDANNVAYTTGKLSFHTDYPALHHPPGVQLLHCIKQTVTGGDSEIVDGFNVCQKLKKNNPQAFQILSSTFVDFTDIGVDYCDFSVQSKHKIIELDDKGQVVRINFNNATRDTIFDVPVERVQPFYAALKEFVDLMNSKESKFTFKMNPGDVITFDNWRLLHGRRSYEAGTEISRHLEGAYADWDVVMSRLRILRQRVENGN

SEQ ID NO: 24 - protein, 492 aa, Homo Sapiens
MNRIRIHVLPTNRGRITPVPRSQEPLSCAFTHRPCSHPRLEGQEFCIKHILEDKNAPFKQCSYISTKNGKRCPNAAPKPEKKDGVSFCAEHVRRNALALHAQMKKTNPGPVGETLLCQLSSYAKTELGSQTPESSRSEASRILDEDSWSDGEQEPITVDQTWRGDPDSEADSIDSDQEDPLKHAGVYTAEEVALIMREKLIRLQSLYIDQFKRLQHLLKEKKRRYLHNRKVEHEALGSSLLTGPEGLLAKERENLKRLKCLRRYRQRYGVEALLHRQLKERRMLATDGAAQQAHTTRSSQRCLAFVDDVRCSNQSLPMTRHCLTHICQDTNQVLFKCCQGSEEVPCNKPVPVSLSEDPCCPLHFQLPPQMYKPEQVLSVPDDLEAGPMDLYLSAAELQPTESLPLEFSDDLDVVGDGMQCPPSPLLFDPSLTLEDHLVKEIAEDPVDILGQMQMAGDGCRSQGSRNSEKASAPLSQSGLATANGKPEPTSIS

SEQ ID NO: 25 - protein, 375 aa, Homo Sapiens
MMEDDGQPRTLYVGNLSRDVTEVLILQLFSQIGPCKSCKMITEHTSNDPYCFVEFYEHRDAAAALAAMNGRKILGKEVKVNWATTPSSQKKDTSNHFHVFVGDLSPEITTEDIKSAFAPFGKISDARVVKDMATGKSKGYGFVSFYNKLDAENAIVHMGGQWLGGRQIRTNWATRKPPAPKSTQENNTKQLRFEDVVNQSSPKNCTVYCGGIASGLTDQLMRQTFSPFGQIMEIRVFPEKGYSFVRFSTHESAAHAIVSVNGTTIEGHVVKCYWGKESPDMTKNFQQVDYSQWGQWSQVYGNPQQYGQYMANGWQVPPYGVYGQPWNQQGFGVDQSPSAAWMGGFGAQPPQGQAPPPVIPPPNQAGYGMASYQTQ

SEQ ID NO: 26 - protein, 351 aa, Homo Sapiens
MVIMGQCYYNETIGFFYNNSGKELSSHWRPKDVVVVALGLTVSVLVLLTNLLVIAAIASNRRFHQPIYYLLGNLAAADLFAGVAYLFLMFHTGPRTARLSLEGWFLRQGLLDTSLTASVATLLAIAVERHRSVMAVQLHSRLPRGRVVMLIVGVWVAALGLGLLPAHSWHCLCALDRCSRMAPLLSRSYLAVWALSSLLVFLLMVAVYTRIFFYVRRRVQRMAEHVSCHPRYRETTLSLVKTVVIILGAFVVCWTPGQVVLLLDGLGCESCNVLAVEKYFLLLAEANSLVNAAVYSCRDAEMRRTFRRLLCCACLRQSTRESVHYTSSAQGGASTRIMLPENGHPLMDSTL

SEQ ID NO: 27 - protein, 191 aa, Homo Sapiens
MGKTNSKLAPEVLEDLVQNTEFSEQELKQWYKGFLKDCPSGILNLEEFQQLYIKFFPYGDASKFAQHAFRTFDKNGDGTIDFREFICALSVTSRGSFEQKLNWAFEMYDLDGDGRITRLEMLEIIEAIYKMVGTVIMMRMNQDGLTPQQRVDKIFKKMDQDKDDQITLEEFKEAAKSDPSIVLLLQCDMQK

SEQ ID NO: 28 - protein, 115 aa, Homo Sapiens
MSRHSRLQRQVLSLYRDLLRAGRGKPGAEARVRAEFRQHAGLPRSDVLRIEYLYRRGRRQLQLLRSGHATAMGAFVRPRAPTGEPGGVGSQPDDGDSPRNPHDSTGAPETRPDGR

SEQ ID NO: 29 - protein, 609 aa, Homo Sapiens
MESTAYPLNLSLKEEEEEEEIQSRELEDGPADMQKVRICSEGGWVPALFDEVAIYFSDEEWEVLTEQQKALYREVMRMNYETVLSLEFPFPKPDMITRLEGEEESQNSDEWQLQGGTSAENEESDVKPPDWPNPMNATSQFPQPQHFDSFGLRLPRDITELPEWSEGYPFYMAMGFPGYDLSADDIAGKFQFSRGMRRSYDAGFKLMVVEYAESTNNCQAAKQFGVLEKNVRDWRKVKPQLQNAHAMRRAFRGPKNGRFALVDQRVAEYVRYMQAKGDPITREAMQLKALEIAQEMNIPEKGFKASLGWCRRMMRRYDLSLRHKVPVPQHLPEDLTEKLVTYQRSVLALRRAHDYEVAQMGNADETPICLEVPSRVTVDNQGEKPVLVKTPGREKLKITAMLGVLADGRKLPPYIILRGTYIPPGKFPSGMEIRCHRYGWMTEDLMQDWLEVVWRRRTGAVPKQRGMLILNGFRGHATDSVKNSMESMNTDMVIIPGGLTSQLQVLDVVVYKPLNDSVRAQYSNWLLAGNLALSPTGNAKKPPLGLFLEWVMVAWNSISSESIVQGFKKCHISSNLEEEDDVLWEIESELPGGGEPPKDCDTESMAESN

SEQ ID NO: 30 - protein, 236 aa, Homo Sapiens
MGVEGCTKCIKYLLFVFNFVFWLAGGVILGVALWLRHDPQTTNLLYLELGDKPAPNTFYVGIYILIAVGAVMMFVGFLGCYGAIQESQCLLGTFFTCLVILFACEVAAGIWGFVNKDQIAKDVKQFYDQALQQAVVDDDANNAKAVVKTFHETLDCCGSSTLTALTTSVLKNNLCPSGSNIISNLFKEDCHQKIDDLFSGKLYLIGIAAIVVAVIMIFEMILSMVLCCGIRNSSVY

SEQ ID NO: 31 - protein, 216 aa, Homo Sapiens
MQAGKPILYSYFRSSCSWRVRIALALKGIDYETVPINLIKDGGQQFSKDFQALNPMKQVPTLKIDGITIHQSLAIIEYLEEMRPTPRLLPQDPKKRASVRMISDLIAGGIQPLQNLSVLKQVGEEMQLTWAQNAITCGFNALEQILQSTAGIYCVGDEVTMADLCLVPQVANAERFKVDLTPYPTISSINKRLLVLEAFQVSHPCRQPDTPTELRA

SEQ ID NO: 32 - protein, 1544 aa, Homo Sapiens
MEAATTLHPGPRPALPLGGPGPLGEFLPPPECPVFEPSWEEFADPFAFIHKIRPIAEQTGICKVRPPPDWQPPFACDVDKLHFTPRIQRLNELEAQTRVKLNFLDQIAKYWELQGSTLKIPHVERKILDLFQLNKLVAEEGGFAVVCKDRKWTKIATKMGFAPGKAVGSHIRGHYERILNPYNLFLSGDSLRCLQKPNLTTDTKDKEYKPHDIPQRQSVQPSETCPPARRAKRMRAEAMNIKIEPEETTEARTHNLRRRMGCPTPKCENEKEMKSSIKQEPIERKDYIVENEKEKPKSRSKKATNAVDLYVCLLCGSGNDEDRLLLCDGCDDSYHTFCLIPPLHDVPKGDWRCPKCLAQECSKPQEAFGFEQAARDYTLRTFGEMADAFKSDYFNMPVHMVPTELVEKEFWRLVSTIEEDVTVEYGADIASKEFGSGFPVRDGKIKLSPEEEEYLDSGWNLNNMPVMEQSVLAHITADICGMKLPWLYVGMCFSSFCWHIEDHWSYSINYLHWGEPKTWYGVPGYAAEQLENVMKKLAPELFVSQPDLLHQLVTIMNPNTLMTHEVPVYRTNQCAGEFVITFPRAYHSGFNQGFNFAEAVNFCTVDWLPLGRQCVEHYRLLHRYCVFSHDEMICKMASKADVLDVVVASTVQKDMAIMIEDEKALRETVRKLGVIDSERMDFELLPDDERQCVKCKTTCFMSAISCSCKPGLLVCLHHVKELCSCPPYKYKLRYRYTLDDLYPMMNALKLRAESYNEWALNVNEALEAKINKKKSLVSFKALIEESEMKKFPDNDLLRHLRLVTQDAEKCASVAQQLLNGKRQTRYRSGGGKSQNQLTVNELRQFVTQLYALPCVLSQTPLLKDLLNRVEDFQQHSQKLLSEETPSAAELQDLLDVSFEFDVELPQLAEMRIRLEQARWLEEVQQACLDPSSLTLDDMRRLIDLGVGLAPYSAVEKAMARLQELLTVSEHWDDKAKSLLKARPRHSLNSLATAVKEIEEIPAYLPNGAALKDSVQRARDWLQDVEGLQAGGRVPVLDTLIELVTRGRSIPVHLNSLPRLETLVAEVQAWKECAVNTFLTENSPYSLLEVLCPRCDIGLLGLKRKQRKLKEPLPNGKKKSTKLESLSDLERALTESKETASAMATLGEARLREMEALQSLRLANEGKLLSPLQDVDIKICLCQKAPAAPMIQCELCRDAFHTSCVAVPSISQGLRIWLCPHCRRSEKPPLEKILPLLASLQRIRVRLPEGDALRYMIERTVNWQHRAQQLLSSGNLKFVQDRVGSGLLYSRWQASAGQVSDTNKVSQPPGTTSFSLPDDWDNRTSYLHSPFSTGRSCIPLHGVSPEVNELLMEAQLLQVSLPEIQELYQTLLAKPSPAQQTDRSSPVRPSSEKNDCCRGKRDGINSLERKLKRRLEREGLSSERWERVKKMRTPKKKKIKLSHPKDMNNFKLERERSYELVRSAETHSLPSDTSYSEQEDSEDEDAICPAVSCLQPEGDEVDWVQCDGSCNQWFHQVCVGVSPEMAEKEDYICVRCTVKDAPSRK

SEQ ID NO: 33 - protein, 226 aa, Homo Sapiens
MGIMAASRPLSRFWEWGKNIVCVGRNYADHVREMRSAVLSEPVLFLKPSTAYAPEGSPILMPAYTRNLHHELELGVVMGKRCRAVPEAAAMDYVGGYALCLDMTARDVQDECKKKGLPWTLAKSFTASCPVSAFVPKEKIPDPHKLKLWLKVNGELRQEGETSSMIFSIPYIISYVSKIITLEEGDIILTGTPKGVGPVKENDEIEAGIHGLPKVSSATLPVRLQE

SEQ ID NO: 34 - protein, 1217 aa, Homo Sapiens
MFLYNLTLQRATGISFAIHGNFSGTKQQEIVVSRGKILELLRPDPNTGKVHTLLTVEVFGVIRSLMAFRLTGGTKDYIVVGSDSGRIVILEYQPSKNMFEKIHQETFGKSGCRRIVPGQFLAVDPKGRAVMISAIEKQKLVYILNRDAAARLTISSPLEAHKANTLVYHVVGVDVGFENPMFACLEMDYEEADNDPTGEAAANTQQTLTFYELDLGLNHVVRKYSEPLEEHGNFLITVPGGSDGPSGVLICSENYITYKNFGDQPDIRCPIPRRRNDLDDPERGMIFVCSATHKTKSMFFFLAQTEQGDIFKITLETDEDMVTEIRLKYFDTVPVAAAMCVLKTGFLFVASEFGNHYLYQIAHLGDDDEEPEFSSAMPLEEGDTFFFQPRPLKNLVLVDELDSLSPILFCQIADLANEDTPQLYVACGRGPRSSLRVLRHGLEVSEMAVSELPGNPNAVWTVRRHIEDEFDAYIIVSFVNATLVLSIGETVEEVTDSGFLGTTPTLSCSLLGDDALVQVYPDGIRHIRADKRVNEWKTPGKKTIVKCAVNQRQVVIALTGGELVYFEMDPSGQLNEYTERKEMSADVVCMSLANVPPGEQRSRFLAVGLVDNTVRIISLDPSDCLQPLSMQALPAQPESLCIVEMGGTEKQDELGERGSIGFLYLNIGLQNGVLLRTVLDPVTGDLSDTRTRYLGSRPVKLFRVRMQGQEAVLAMSSRSWLSYSYQSRFHLTPLSYETLEFASGFASEQCPEGIVAISTNTLRILALEKLGAVFNQVAFPLQYTPRKFVIHPESNNLIIIETDHNAYTEATKAQRKQQMAEEMVEAAGEDERELAAEMAAAFLNENLPESIFGAPKAGNGQWASVIRVMNPIQGNTLDLVQLEQNEAAFSVAVCRFSNTGEDWYVLVGVAKDLILNPRSVAGGFVYTYKLVNNGEKLEFLHKTPVEEVPAAIAPFQGRVLIGVGKLLRVYDLGKKKLLRKCENKHIANYISGIQTIGHRVIVSDVQESFIWVRYKRNENQLIIFADDTYPRWVTTASLLDYDTVAGADKFGNICVVRLPPNTNDEVDEDPTGNKALWDRGLLNGASQKAEVIMNYHVGETVLSLQKTTLIPGGSESLVYTTLSGGIGILVPFTSHEDHDFFQHVEMHLRSEHPPLCGRDHLSFRSYYFPVKNVIDGDLCEQFNSMEPNKQKNVSEELDRTPPEVSKKLEDIRTRYAF

SEQ ID NO: 35 - protein, 616 aa, Homo Sapiens
MVGQLSEGAIAAIMQKGDTNIKPILQVINIRPITTGNSPPRYRLLMSDGLNTLSSFMLATQLNPLVEEEQLSSNCVCQIHRFIVNTLKDGRRVVILMELEVLKSAEAVGVKIGNPVPYNEGLGQPQVAPPAPAASPAASSRPQPQNGSSGMGSTVSKAYGASKTFGKAAGPSLSHTSGGTQSKVVPIASLTPYQSKWTICARVTNKSQIRTWSNSRGEGKLFSLELVDESGEIRATAFNEQVDKFFPLIEVNKVYYFSKGTLKIANKQFTAVKNDYEMTFNNETSVMPCEDDHHLPTVQFDFTGIDDLENKSKDSLVDIIGICKSYEDATKITVRSNNREVAKRNIYLMDTSGKVVTATLWGEDADKFDGSRQPVLAIKGARVSDFGGRSLSVLSSSTIIANPDIPEAYKLRGWFDAEGQALDGVSISDLKSGGVGGSNTNWKTLYEVKSENLGQGDKPDYFSSVATVVYLRKENCMYQACPTQDCNKKVIDQQNGLYRCEKCDTEFPNFKYRMILSVNIADFQENQWVTCFQESAEAILGQNAAYLGELKDKNEQAFEEVFQNANFRSFIFRVRVKVETYNDESRIKATVMDVKPVDYREYGRRLVMSIRRSALM

SEQ ID NO: 36 - protein, 314 aa, Homo sapiens
MAFVTRQFMRSVSSSSTASASAKKIIVKHVTVIGGGLMGAGIAQVAAATGHTVVLVDQTEDILAKSKKGIEESLRKVAKKKFAENLKAGDEFVEKTLSTIATSTDAASVVHSTDLVVEAIVENLKVKNELFKRLDKFAAEHTIFASNTSSLQITSIANATTRQDRFAGLHFFNPVPVMKLVEVIKTPMTSQKTFESLVDFSKALGKHPVSCKDTPGFIVNRLLVPYLMEAIRLYERGDASKEDIDTAMKLGAGYPMGPFELLDYVGLDTTKFIVDGWHEMDAENPLHQPSPSLNKLVAENKFGKKTGEGFYKYK

SEQ ID NO: 37 - protein, 856 aa, Homo Sapiens
MANETQKVGAIHFPFPFTPYSIQEDFMAELYRVLEAGKIGIFESPTGTGKSLSLICGALSWLRDFEQKKREEEARLLETGTGPLHDEKDESLCLSSSCEGAAGTPRPAGEPAWVTQFVQKKEERDLVDRLKAEQARRKQREERLQQLQHRVQLKYAAKRLRQEEEERENLLRLSREMLETGPEAERLEQLESGEEELVLAEYESDEEKKVASRVDEDEDDLEEEHITKIYYCSRTHSQLAQFVHEVKKSPFGKDVRLVSLGSRQNLCVNEDVKSLGSVQLINDRCVDMQRSRHEKKKGAEEEKPKRRRQEKQAACPFYNHEQMGLLRDEALAEVKDMEQLLALGKEARACPYYGSRLAIPAAQLVVLPYQMLLHAATRQAAGIRLQDQVVIIDEAHNLIDTITGMHSVEVSGSQLCQAHSQLLQYVERYGKRLKAKNLMYLKQILYLLEKFVAVLGGNIKQNPNTQSLSQTGTELKTINDFLFQSQIDNINLFKVQRYCEKSMISRKLFGFTERYGAVFSSREQPKLAGFQQFLQSLQPRTTEALAAPADESQASTLRPASPLMHIQGFLAALTTANQDGRVILSRQGSLSQSTLKFLLLNPAVHFAQVVKECRAVVIAGGTMQPVSDFRQQLLACAGVEAERVVEFSCGHVIPPDNILPLVICSGISNQPLEFTFQKRELPQMIFQEPKSAHQVEQVLLAYSRCIQACGQERGQVTGALLLSVVGGKMSEGINFSDNLGRCVVMVGMPFPNIRSAELQEKMAYLDQTLPRAPGQAPPGKALVENLCMKAVNQSIGRAIRHQKDFASVVLLDQRYARPPVLAKLPAWIRARVEVKATFGPAIAAVQKFHREKSASS

SEQ ID NO: 38 - protein, 346 aa, Homo Sapiens
MALDVKSRAKRYEKLDFLGEGQFATVYKARDKNTNQIVAIKKIKLGHRSEAKDGINRTALREIKLLQELSHPNIIGLLDAFGHKSNISLVFDFMETDLEVIIKDNSLVLTPSHIKAYMLMTLQGLEYLHQHWILHRDLKPNNLLLDENGVLKLADFGLAKSFGSPNRAYTHQVVTRWYRAPELLFGARMYGVGVDMWAVGCILAELLLRVPFLPGDSDLDQLTRIFETLGTPTEEQWPDMCSLPDYVTFKSFPGIPLHHIFSAAGDDLLDLIQGLFLFNPCARITATQALKMKYFSNRPGPTPGCQLPRPNCPVETLKEQSNPALAIKRKRTEALEQGGLPKKLIF

SEQ ID NO: 39 - protein, 183 aa, Homo Sapiens
MAASMARGGVSARVLLQAARGTWWNRPGGTSGSGEGVALGTTRKFQATGSRPAGEEDAGGPERPGDVVNVVFVDRSGQRIPVSGRVGDNVLHLAQRHGVDLEGACEASLACSTCHVYVSEDHLDLLPPPEEREDDMLDMAPLLQENSRLGCQIVLTPELEGAEFTLPKITRNFYVDGHVPKPH

SEQ ID NO: 40 - protein, 688 aa, Homo Sapiens
MWCIVLFSLLAWVYAEPTMYGEILSPNYPQAYPSEVEKSWDIEVPEGYGIHLYFTHLDIELSENCAYDSVQIISGDTEEGRLCGQRSSNNPHSPIVEEFQVPYNKLQVIFKSDFSNEERFTGFAAYYVATDINECTDFVDVPCSHFCNNFIGGYFCSCPPEYFLHDDMKNCGVNCSGDVFTALIGEIASPNYPKPYPENSRCEYQIRLEKGFQVVVTLRREDFDVEAADSAGNCLDSLVFVAGDRQFGPYCGHGFPGPLNIETKSNALDIIFQTDLTGQKKGWKLRYHGDPMPCPKEDTPNSVWEPAKAKYVFRDVVQITCLDGFEVVEGRVGATSFYSTCQSNGKWSNSKLKCQPVDCGIPESIENGKVEDPESTLFGSVIRYTCEEPYYYMENGGGGEYHCAGNGSWVNEVLGPELPKCVPVCGVPREPFEEKQRIIGGSDADIKNFPWQVFFDNPWAGGALINEYWVLTAAHVVEGNREPTMYVGSTSVQTSRLAKSKMLTPEHVFIHPGWKLLEVPEGRTNFDNDIALVRLKDPVKMGPTVSPICLPGTSSDYNLMDGDLGLISGWGRTEKRDRAVRLKAARLPVAPLRKCKEVKVEKPTADAEAYVFTPNMICAGGEKGMDSCKGDSGGAFAVQDPNDKTKFYAAGLVSWGPQCGTYGLYTRVKNYVDWIMKTMQENSTPRED

SEQ ID NO: 41 - protein, 459 aa, Homo Sapiens
MAASGAVEPGPPGAAVAPSPAPAPPPAPDHLFRPISAEDEEQQPTEIESLCMNCYCNGMTRLLLTKIPFFREIIVSSFSCEHCGWNNTEIQSAGRIQDQGVRYTLSVRALEDMNREVVKTDSAATRIPELDFEIPAFSQKGALTTVEGLITRAISGLEQDQPARRANKDATAERIDEFIVKLKELKQVASPFTLIIDDPSGNSFVENPHAPQKDDALVITHYNRTRQQEEMLGLQEEAPAEKPEEEDLRNEVLQFSTNCPECNAPAQTNMKLVQIPHFKEVIIMATNCENCGHRTNEVKSGGAVEPLGTRITLHITDASDMTRDLLKSETCSVEIPELEFELGMAVLGGKFTTLEGLLKDIRELVTKNPFTLGDSSNPGQTERLQEFSQKMDQIIEGNMKAHFIMDDPAGNSYLQNVYAPEDDPEMKVERYKRTFDQNEELGLNDMKTEGYEAGLAPQR

SEQ ID NO: 42 - protein, 639 aa, Homo Sapiens
MGGHFWPPEPYTVFMWGSPWEADSPRVKLRGREKGRQTEGGAFPLVSSALSGDPRFFSPTTPPAEPIVVRLKEVRLQRDDFEILKVIGRGAFSEVAVVKMKQTGQVYAMKIMNKWDMLKRGEVSCFREERDVLVNGDRRWITQLHFAFQDENYLYLVMEYYVGGDLLTLLSKFGERIPAEMARFYLAEIVMAIDSVHRLGYVHRDIKPDNILLDRCGHIRLADFGSCLKLRADGTVRSLVAVGTPDYLSPEILQAVGGGPGTGSYGPECDWWALGVFAYEMFYGQTPFYADSTAETYGKIVHYKEHLSLPLVDEGVPEEARDFIQRLLCPPETRLGRGGAGDFRTHPFFFGLDWDGLRDSVPPFTPDFEGATDTCNFDLVEDGLTAMVSGGGETLSDIREGAPLGVHLPFVGYSYSCMALRDSEVPGPTPMELEAEQLLEPHVQAPSLEPSVSPQDETAEVAVPAAVPAAEAEAEVTLRELQEALEEEVLTRQSLSREMEAIRTDNQNFASQLREAEARNRDLEAHVRQLQERMELLQAEGATAVTGVPSPRATDPPSHLDGPPAVAVGQCPLVGPGPMHRRHLLLPARVPRPGLSEALSLLLFAVVLSRAAALGCIGLVAHAGQLTAVWRRPGAARAP

SEQ ID NO: 43 - protein, 344 aa, Homo Sapiens
MFTSTGSSGLYKAPLSKSLLLVPSALSLLLALLLPHCQKLFVYDLHAVKNDFQIWRLICGRIICLDLKDTFCSSLLIYNFRIFERRYGSRKFASFLLGSWVLSALFDFLLIEAMQYFFGITAASNLPSGFLAPVFALFVPFYCSIPRVQVAQILGPLSITNKTLIYILGLQLFTSGSYIWIVAISGLMSGLCYDSKMFQVHQVLCIPSWMAKFFSWTLEPIFSSSEPTSEARIGMGATLDIQRQQRMELLDRQLMFSQFAQGRRQRQQQGGMINWNRLFPPLRQRQNVNYQGGRQSEPAAPPLEVSEEQVARLMEMGFSRGDALEALRASNNDLNVATNFLLQH

SEQ ID NO: 44 - protein, 326 aa, Homo Sapiens
MDYSHQTSLVPCGQDKYISKNELLLHLKTYNLYYEGQNLQLRHREEEDEFIVEGLLNISWGLRRPIRLQMQDDNERIRPPPSSSSWHSGCNLGAQGTTLKPLTVPKVQISEVDAPPEGDQMPSSTDSRGLKPLQEDTPQLMRTRSDVGVRRRGNVRTPSDQRRIRRHRFSINGHFYNHKTSVFTPAYGSVTNVRINSTMTTPQVLKLLLNKFKIENSAEEFALYVVHTSGEKQKLKATDYPLIARILQGPCEQISKVFLMEKDQVEEVTYDVAQYIKFEMPVLKSFIQKLQEEEDREVKKLMRKYTVLRLMIRQRLEEIAETPATI

SEQ ID NO: 45 - protein, 572 aa, Homo Sapiens
METPSQRRATRSGAQASSTPLSPTRITRLQEKEDLQELNDRLAVYIDRVRSLETENAGLRLRITESEEVVSREVSGIKAAYEAELGDARKTLDSVAKERARLQLELSKVREEFKELKARNTKKEGDLIAAQARLKDLEALLNSKEAALSTALSEKRTLEGELHDLRGQVAKLEAALGEAKKQLQDEMLRRVDAENRLQTMKEELDFQKNIYSEELRETKRRHETRLVEIDNGKQREFESRLADALQELRAQHEDQVEQYKKELEKTYSAKLDNARQSAERNSNLVGAAHEELQQSRIRIDSLSAQLSQLQKQLAAKEAKLRDLEDSLARERDTSRRLLAEKEREMAEMRARMQQQLDEYQELLDIKLALDMEIHAYRKLLEGEEERLRLSPSPTSQRSRGRASSHSSQTQGGGSVTKKRKLESTESRSSFSQHARTSGRVAVEEVDEEGKFVRLRNKSNEDQSMGNWQIKRQNGDDPLLTYRFPPKFTLKAGQVVTIWAAGAGATHSPPTDLVWKAQNTWGCGNSLRTALINSTGEEVAMRKLVRSVTVVEDDEDEDGDDLLHHHHVSGSRR

SEQ ID NO: 46 - protein, 306 aa, Homo Sapiens [sequence omitted]

SEQ ID NO: 47 - protein, 469 aa, Homo Sapiens
MSALTPPTDMPTPTTDKITQAAMETIYLCKFRVSMDGEWLCLRELDDISLTPDPEPTHEDPNYLMANERMNLMNMAKLSIKGLIESALNLGRTLDSDYAPLQQFFVVMEHCLKHGLKAKKTFLGQNKSFWGPLELVEKLVPEAAEITASVKDLPGLKTPVGRGRAWLRLALMQKKLSEYMKALINKKELLSEFYEPNALMMEEEGAIIAGLLVGLNVIDANFCMKGEDLDSQVGVIDFSMYLKDGNSSKGTEGDGQITAILDQKNYVEELNRHLNATVNNLQAKVDALEKSNTKLTEELAVANNRIITLQEEMERVKEESSYILESNRKGPKQDRTAEGQALSEARKHLKEETQLRLDVEKELEMQISMRQEMELAMKMLEKDVCEKQDALVSLRQQLDDLRALKHELAFKLQSSDLGVKQKSELNSRLEEKTNQMAATIKQLEQSEKDLVKQAKTLNSAANKLIPKHH

SEQ ID NO: 48 - protein, 212 aa, Homo Sapiens
MDPLFQQTHKQVHEIQSCMGRLETADKQSVHIVENEIQASIDQIFSRLERLEILSSKEPPNKRQNARLRVDQLKYDVQHLQTALRNFQHRRHAREQQERQREELLSRTFTTNDSDTTIPMDESLQFNSSLQKVHNGMDDLILDGHNILDGLRTQRLTLKGTQKKILDIANMLGLSNTVMRLIEKRAFQDKYFMIGGMLLTCVVMFLVVQYLT

SEQ ID NO: 49 - protein, 489 aa, Homo Sapiens
MKELDPKNDISEDKLSVVGEATGGPTRNGARGPGSEGVWEPGSWPERPRGDAGAEWEPLGIPQGNKLLGGSVPACHELKAFANQGCVLVPPRLDDPTEKGACPPVRRGKNFSSTSDLSKPPMPCEEKKTYDCSECGKAFSRSSSLIKHQRIHTGEKPFECDTCGKHFIERSSLTIHQRVHTGEKPYACGDCGKAFSQRMNLTVHQRTHTGEKPYVCDVCGKAFRKTSSLTQHERIHTGEKPYACGDCGKAFSQNMHLIVHQRTHTGEKPYVCPECGRAFSQNMHLTEHQRTHTGEKPYACKECGKAFNKSSSLTLHQRNHTGEKPYVCGECGKAFSQSSYLIQHQRFHIGVKPFECSECGKAFSKNSSLTQHQRIHTGEKPYECYICKKHFTGRSSLIVHQIVHTGEKPYVCGECGKAFSQSAYLIEHQRIHTGEKPYRCGQCGKSFIKNSSLTVHQRIHTGEKPYRCGECGKTFSRNTNLTRHLRIHT

SEQ ID NO: 50 - protein, 1156 aa, Homo Sapiens
MFPAAPSPRTPGTGSRRGPLAGLGPGSTPRTASRKGLPLGSAVSSPVLFSPVGRRSSLSSRGTPTRMFPHHSITESVNYDVKTFGSSLPVKVMEALTLAEVDDQLTINIDEGGWACLVCKEKLIIWKIALSPITKLSVCKELQLPPSDFHWSADLVALSYSSPSGEAHSTQAVAVMVATREGSIRYWPSLAGEDTYTEAFVDSGGDKTYSFLTAVQGGSFILSSSGSQLIRLIPESSGKIHQHILPQGQGMLSGIGRKVSSLFGILSPSSDLTLSSVLWDRERSSFYSLTSSNISKWELDDSSEKHAYSWDINRALKENITDAIWGSESNYEAIKEGVNIRYLDLKQNCDGLVILAAAWHSADNPCLIYYSLITIEDNGCQMSDAVTVEVTQYNPPFQSEDLILCQLTVPNFSNQTAYLYNESAVYVCSTGTGKFSLPQEKIVFNAQGDSVLGAGACGGVPIIFSRNSGLVSITSRENVSILAEDLEGSLASSVAGPNSESMIFETTTKNETIAQEDKIKLLKAAFLQYCRKDLGHAQMVVDELFSSHSDLDSDSELDRAVTQISVDLMDDYPASDPRWAESVPEEAPGFSNTSLIILHQLEDKMKAHSFLMDFIHQVGLFGRLGSFPVRGTPMATRLLLCEHAEKLSAAIVLKNHHSRLSDLVNTAILIALNKREYEIPSNLTPADVFFREVSQVDTICECLLEHEEQVLRDAPMDSIEWAEVVINVNNILKDMLQAASHYRQNRNSLYRREESLEKEPEYVPWTATSGPGGIRTVIIRQHEIVLKVAYPQADSNLRNIVTEQLVALIDCFLDGYVSQLKSVDKSSNRERYDNLEMEYLQKRSDLLSPLLSLGQYLWAASLAEKYCDFDILVQMCEQTDNQSRLQRYMTQFADQNFSDFLFRWYLEKGKRGKLLSQPISQHGQLANFLQAHEHLSWLHEINSQELEKAHATLLGLANMETRYFAKKKTLLGLSKLAALASDFSEDMLQEKIEEMAEQERFLLHQETLPEQLLAEKQLNLSAMPVLTAPQLIGLYICEENRRANEYDFKKALDLLEYIDEEEDININDLKLEILCKALQRDNWSSSDGKDDPIEVSKDSIFVKILQKLLKDGIQLSEYLPEVKDLLQADQLGSLKSNPYFEFVLKANYEYYVQGQI

SEQ ID NO: 51 - protein, 397 aa, Homo Sapiens
MNAGSDPVVIVSAARTIIGSFNGALAAVPVQDLGSTVIKEVLKRATVAPEDVSEVIFGHVLAAGCGQNPVRQASVGAGIPYSVPAWSCQMICGSGLKAVCLAVQSIGIGDSSIVVAGGMENMSKAPHLAYLRTGVKIGEMPLTDSILCDGLTDAFHNCHMGITAENVAKKWQVSREDQDKVAVLSQNRTENAQKAGHFDKEIVPVLVSTRKGLIEVKTDEFPRHGSNIEAMSKLKPYFLTDGTGTVTPANASGINDGAAAVVLMKKSEADKRGLTPLARIVSWSQVGVEPSIMGIGPIPAIKQAVTKAGWSLEDVDIFEINEAFAAVSAAIVKELGLNPEKVNIEGGAIALGHPLGASGCRILVTLLHTLERMGRSRGVAALCIGGGMGIAMCVQRE

SEQ ID NO: 52 - protein, 311 aa, Homo Sapiens
MQRPGPFSTLYGRVLAPLPGRAGGAASGGGGNSWDLPGSHVRLPGRAQSGTRGGAGNTSTSCGDSNSICPAPSTMSKAEEAKKLAGRAAVENHVRNNQVLGIGSGSTIVHAVQRIAERVKQENLNLVCIPTSFQARQLILQYGLTLSDLDRHPEIDLAIDGADEVDADLNLIKGGGGCLTQEKIVAGYASRFIVIADFRKDSKNLGDQWHKGIPIEVIPMAYVPVSRAVSQKFGGVVELRMAVNKAGPVVTDNGNFILDWKFDRVHKWSEVNTAIKMIPGVVDTGLFINMAERVYFGMQDGSVNMREKPFC

SEQ ID NO: 53 - protein, 247 aa, Homo Sapiens
MAGITTIEAVKRKIQVLQQQADDAEERAERLQREVEGERRAREQAEAEVASLNRRIQLVEEELDRAQERLATALQKLEEAEKAADESERGMKVIENRALKDEEKMELQEIQLKEAKHIAEEADRKYEEVARKLVIIEGDLERTEERAELAESRCREMDEQIRLMDQNLKCLSAAEEKYSQKEDKYEEEIKILTDKLKEAETRAEFAERSVAKLEKTIDDLEERLYSQLERNRLLSNELKLTLHDLCD

SEQ ID NO: 54 - protein, 1832 aa, Homo Sapiens
MEDTPPSLSCSDCQRHFPSLPELSRHRELLHPSPNQDSEEADSIPRPYRCQQCGRGYRHPGSLVNHRRTHETGLFPCTTCGKDFSNPMALKSHMRTHAPEGRRRHRPPRPKEATPHLQGETVSTDSWGQRLGSSEGWENQTKHTEETPDCESVPDPRAASGTWEDLPTRQREGLASHPGPEDGADGWGPSTNSARAPPLPIPASSLLSNLEQYLAESVVNFTGGQEPTQSPPAEEERRYKCSQCGKTYKHAGSLTNHRQSHTLGIYPCAICFKEFSNLMALKNHSRLHAQYRPYHCPHCPRVFRLPRELLEHQQSHEGERQEPRWEEKGMPTTNGHTDESSQDQLPSAQMLNGSAELSTSGELEDSGLEEYRPFRCGDCGRTYRHAGSLINHRKSHQTGVYPCSLCSKQLFNAAALKNHVRAHHRPRQGVGENGQPSVPPAPLLLAETTHKEEEDPTTTLDHRPYKCSECGRAYRHRGSLVNHRHSHRTGEYQCSLCPRKYPNLMALRNHVRVHCKAARRSADIGAEGAPSHLKVELPPDPVEAEAAPHTDQDHVCKHEEEATDITPAADKTAAHICSICGLLFEDAESLERHGLTHGAGEKENSRTETTMSPPRAFACRDCGKSYRHSGSLINHRQTHQTGDFSCGACAKHFHTMAAMKNHLRRHSRRRSRRHRKRAGGASGGREAKLLAAESWTRELEDNEGLESPQDPSGESPHGAEGNLESDGDCLQAESEGDKCGLERDETHFQGDKESGGTGEGLERKDASLLDNLDIPGEEGGGTHFCDSLTGVDEDQKPATGQPNSSSHSANAVTGWQAGAAHTCSDCGHSFPHATGLLSHRPCHPPGIYQCSLCPKEFDSLPALRSHFQNHRPGEATSAQPFLCCLCGMIFPGRAGYRLHRRQAHSSSGMTEGSEEEGEEEGVAEAAPARSPPLQLSEAELLNQLQREVEALDSAGYGHICGCCGQTYDDLGSLERHHQSQSSGTTADKAPSPLGVAGDAMEMVVDSVLEDIVNSVSGEGGDAKSQEGAGTPLGDSLCIQGGESLLEAQPRPFRCNQCGKTYRHGGSLVNHRKIHQTGDFLCPVCSRCYPNLAAYRNHLRNHPRCKGSEPQVGPIPEAAGSSELQVGPIPEGGSNKPQHMAEEGPGQAEVEKLQEELKVEPLEEVARVKEEVWEETTVKGEEIEPRLETAEKGCQTEASSERPFSCEVCGRSYKHAGSLINHRQSHQTGHFGCQACSKGFSNLMSLKNHRRIHADPRRFRCSECGKAFRLRKQLASHQRVHMERRGGGGTRKATREDRPFRCGQCGRTYRHAGSLLNHRRSHETGQYSCPTCPKTYSNRMALKDHQRLHSENRRRRAGRSRRTAVRCALCGRSFPGRGSLERHLREHEETEREPANGQGGLDGTAASEANLTGSQGLETQLGGAEPVPHLEDGVPRPGERSQSPIRAASSEAPEPLSWGAGKAGGWPVGGGLGNHSGGWVPQFLTRSEEPEDSVHRSPCHAGDCQLNGPTLSHMDSWDNRDNSSQLQPGSHSSCSQCGKTYCQSGSLLNHNTNKTDRHYCLLCSKEFLNPVATKSHSHNHIDAQTFACPDCGKAFESHQELASHLQAHARGHSQVPAQMEEARDPKAGTGEDQVVLPGQGKAQEAPSETPRGPGESVERARGGQAVTSMAAEDKERPFRCTQCGRSYRHAGSLLNHQKAHTTGLYPCSLCPKLLPNLLSLKNHSRTHTDPKRHCCSICGKAFRTAARLEGHGRVHAPREGPFTCPHCPRHFRRRISFVQHQQQHQEEWTVAGSGAPVAPVTGRGDLPLPPPPTPTTPLLDPSPQWPADLSFSL

SEQ ID NO: 55 - protein, 619 aa, Homo Sapiens
MSGLVLGQRDEPAGHRLSQEEILGSTRLVSQGLEALRSEHQAVLQSLSQTIECLQQGGHEEGLVHEKARQLRRSMENIELGLSEAQVMLALASHLSTVESEKQKLRAQVRRLCQENQWLRDELAGTQQRLQRSEQAVAQLEEEKKHLEFLGQLRQYDEDGHTSEEKEGDATKDSLDDLFPNEEEEDPSNGLSRGQGATAAQQGGYEIPARLRTLHNLVIQYAAQGRYEVAVPLCKQALEDLERTSGRGHPDVATMLNILALVYRDQNKYKEAAHLLNDALSIRESTLGPDHPAVAATLNNLAVLYGKRGKYKEAEPLCQRALEIREKVLGTNHPDVAKQLNNLALLCQNQGKYEAVERYYQRALAIYEGQLGPDNPNVARTKNNLASCYLKQGKYAEAETLYKEILTRAHVQEFGSVDDDHKPIWMHAEEREEMSKSRHHEGGTPYAEYGGWYKACKVSSPTVNTTLRNLGALYRRQGKLEAAETLEECALRSRRQGTDPISQTKVAELLGESDGRRTSQEGPGDSVKFEGGEDASVAVEWSGDGSGTLQRSGSLGKIRDVLRRSSELLVRKLQGTEPRPSSSNMKRAASLNYLNQPSAAPLQVSRGLSASTMDLSSSS

SEQ ID NO: 56 - protein, 259 aa, Homo Sapiens
MPGANYRAGAGAGAGARRPRGARDREEDGGGLEPAAVARDLLRGTSNMSFEELLELQSQVGTKTYKQLVAGNSPKKQASRPPIQNACVADKHRPLEMSAKIRVPFLRQVVPISKKVARDPRFDDLSGEYNPEVFDKTYQFLNDIRAKEKELVKKQLKKHLSGEEHEKLQQLLQRMEQQEMAQQERKQQQELHLALKQERRAQAQQGHRPYFLKKSEQRQLALAEKFKELKRSKKLENFLSRKRRRNAGKDRRHLPLSKE

SEQ ID NO: 57 - protein, 1386 aa, Homo Sapiens
MLRYLLKTLLQMNLFADSLAGDISNSSELLLGFNSSLAALNHTLLPPGDPSLNGSRVGPEDAMPRIVEQPPDLLVSRGEPATLPCRAEGRPRPNIEWYKNGARVATVREDPRAHRLLLPSGALFFPRIVHGRRARPDEGVYTCVARNYLGAAASRNASLEVAVLRDDFRQSPGNVVVAVGEPAVLECVPPRGHPEPSVSWRKDGARLKEEEGRITIRGGKLMMSHTLKSDAGMYVCVASNMAGERESAAAEVMVLERPSFLRRPVNQVVLADAPVTFLCEVKGDPPPRLRWRKEDGELPTGRYEIRSDHSLWIGHVSAEDEGTYTCVAENSVGRAEASGSLSVHVPPQLVTQPQDQMAAPGESVAFQCETKGNPPPAIFWQKEGSQVLLFPSQSLQPTGRFSVSPRGQLNITAVQRGDAGYYVCQAVSVAGSILAKALLEIKGASLDGLPPVILQGPANQTLVLGSSVWLPCRVTGNPQPSVRWKKDGQWLQGDDLQFKTMANGTLYIANVQEMDMGFYSCVAKSSTGEATWSGWLKMREDWGVSPDPPTEPSSPPGAPSQPVVTEITKNSITLTWKPNPQTGAAVTSYVIEAFSPAAGNTWRTVADGVQLETHTVSGLQPNTIYLFLVRAVGAWGLSEPSPVSEPVRTQDSSPSRPVEDPWRGQQGLAEVAVRLQEPIVLGPRTLQVSWTVDGPVQLVQGFRVSWRVAGPEGGSWTMLDLQSPSQQSTVLRGLPPGTQIQIKVQAQGQEGLGAESLSVTRSIPEEAPSGPPQGVAVALGGDGNSSITVSWEPPLPSQQNGVITEYQIWCLGNESRFHLNRSAAGWARSAMLRGLVPGLLYRTLVAAATSAGVGVPSAPVLVQLPSPPDLEPGLEVGAGLAVRLARVLREPAFLAGSGAACGALLLGLCAALYWRRKQRKELSHYTASFAYTPAVSFPHSEGLSGASSRPPMGLGPAPYSWLADSWPHPSRSPSAQEPRGSCCPSNPDPDDRYYNEAGISLYLAQTARGTAAPGEGPVYSTIDPAGEELQTFHGGFPQHPSGDLGPWSQYAPPEWSQGDSGAKGGKVKLLGKPVQMPSLNWPEALPPPPPSCELSCLEGPEEELEGSSEPEEWCPPMPERSHLTEPSSSGGCLVTPSRRETPSPTPSYGQQSTATLTPSPPDPPQPPTDMPHLHQMPRRVPLGPSSPLSVSQPMLGIREARPAGLGAGPAASPHLSPSPAPSTASSAPGRTWQGNGEMTPPLQGPRARFRKKPKALPYRRENSPGDLPPPPLPPPEEEASWALELRAAGSMSSLERERSGERKAVQAVPLAAQRVLHPDEEAWLPYSRPSFLSRGQGTSTCSTAGSNSSRGSSSSRGSRGPGRSRSRSQSRSQSQRPGQKRREEPR

SEQ ID NO: 58 - protein, 750 aa, Homo Sapiens
MLRAKNQLFLLSPHYLRQVKESSGSRLIQQRLLHQQQPLHPEWAALAKKQLKGKNPEDLIWHTPEGISIKPLYSKRDTMDLPEELPGVKPFTRGPYPTMYTFRPWTIRQYAGFSTVEESNKFYKDNIKAGQQGLSVAFDLATHRGYDSDNPRVRGDVGMAGVAIDTVEDTKILFDGIPLEKMSVSMTMNGAVIPVLANFIVTGEEQGVPKEKLTGTIQNDILKEFMVRNTYIFPPEPSMKIIADIFEYTAKHMPKFNSISISGYHMQEAGADAILELAYTLADGLEYSRTGLQAGLTIDEFAPRLSFFWGIGMNFYMEIAKMRAGRRLWAHLIEKMFQPKNSKSLLLRAHCQTSGWSLTEQDPYNNIVRTAIEAMAAVFGGTQSLHTNSFDEALGLPTVKSARIARNTQIIIQEESGIPKVADPWGGSYMMECLTNDVYDAALKLINEIEEMGGMAKAVAEGIPKLRIEECAARRQARIDSGSEVIVGVNKYQLEKEDAVEVLAIDNTSVRNRQIEKLKKIKSSRDQALAERCLAALTECAASGDGNILALAVDASRARCTVGEITDALKKVFGEHKANDRMVSGAYRQEFGESKEITSAIKRVHKFMEREGRRPRLLVAKMGQDGHDRGAKVIATGFADLGFDVDIGPLFQTPREVAQQAVDADVHAVGISTLAAGHKTLVPELIKELNSLGRPDILVMCGGVIPPQDYEFLFEVGVSNVFGPGTRIPKAAVQVLDDIEKCLEKKQQSV

SEQ ID NO: 59 - protein, 2136 aa, Homo Sapiens
MADVTARSLQYEYKANSNLVLQADRSLIDRTRRDEPTGEVLSLVGKLEGTRMGDKAQRTKPQMQEERRAKRRKRDEDRHDINKMKGYTLLSEGIDEMVGIIYKPKTKETRETYEVLLSFIQAALGDQPRDILCGAADEVLAVLKNEKLRDKERRKEIDLLLGQTDDTRYHVLVNLGKKITDYGGDKEIQNMDDNIDETYGVNVQFESDEEEGDEDVYGEVREEASDDDMEGDEAVVRCTLSANLVASGELMSSKKKDLHPRDIDAFWLQRQLSRFYDDAIVSQKKADEVLEILKTASDDRECENQLVLLLGFNTFDFIKVLRQHRMMILYCTLLASAQSEAEKERIMGKMEADPELSKFLYQLHETEKEDLIREERSRRERVRQSRMDTDLETMDLDQGGEALAPRQVLDLEDLVFTQGSHFMANKRCQLPDGSFRRQRKGYEEVHVPALKPKPFGSEEQLLPVEKLPKYAQAGFEGFKTLNRIQSKLYRAALETDENLLLCAPTGAGKTNVALMCMLREIGKHINMDGTINVDDFKIIYIAPMRSLVQEMVGSFGKRLATYGITVAELTGDHQLCKEEISATQIIVCTPEKWDIITRKGGERTYTQLVRLIILDEIHLLHDDRGPVLEALVARAIRNIEMTQEDVRLIGLSATLPNYEDVATFLRVDPAKGLFYFDNSFRPVPLEQTYVGITEKKAIKRFQIMNEIVYEKIMEHAGKNQVLVFVHSRKETGKTARAIRDMCLEKDTLGLFLREGSASTEVLRTEAEQCKNLELKDLLPYGFAIHHAGMTRVDRTLVEDLFADKHIQVLVSTATLAWGVNLPAHTVIIKGTQVYSPEKGRWTELGALDILQMLGRAGRPQYDTKGEGILITSHGELQYYLSLLNQQLPIESQMVSKLPDMLNAEIVLGNVQNAKDAVNWLGYAYLYIRMLRSPTLYGISHDDLKGDPLLDQRRLDLVHTAALMLDKNNLVKYDKKTGNFQVTELGRIASHYYITNDTVQTYNQLLKPTLSEIELFRVFSLSSEFKNITVREEEKLELQKLLERVPIPVKESIEEPSAKINVLLQAFISQLKLEGFALMADMVYVTQSAGRLMRAIFEIVLNRGWAQLTDKTLNLCKMIDKRMWQSMCPLRQFRKLPEEVVKKIEKKNFPFERLYDLNHNEIGELIRMPKMGKTIHKYVHLFPKLELSVHLQPITRSTLKVELTITPDFQWDEKVHGSSEAFWILVEDVDSEVILHHEYFLLKAKYAQDEHLITFFVPVFEPLPPQYFIRVVSDRWLSCETQLPVSFRHLILPEKYPPPTELLDLQPLPVSALRNSAFESLYQDKFPFFNPIQTQVFNTVYNSDDNVFVGAPTGSGKTICAEFAILRMLLQSSEGRCVYITPMEALAEQVYMDWYEKFQDRLNKKVVLLTGETSTDLKLLGKGNIIISTPEKWDILSRRWKQRKNVQNINLFVVDEVHLIGGENGPVLEVICSRMRYISSQIERPIRIVALSSSLSNAKDVAHWLGCSATSTFNFHPNVRPVPLELHIQGFNISHTQTRLLSMAKPVYHAITKHSPKKPVIVFVPSRKQTRLTAIDILTTCAADIQRQRFLHCTEKDLIPYLEKLSDSTLKETLLNGVGYLHEGLSPMERRLVEQLFSSGAIQVVVASRSLCWGMNVAAHLVIIMDTQYYNGKIHAYVDYPIYDVLQMVGHANRPLQDDEGRCVIMCQGSKKDFFKKFLYEPLPVESHLDHCMHDHFNAEIVTKTIENKQDAVDYLTWTFLYRRMTQNPNYYNLQGISHRHLSDHLSELVEQTLSDLEQSKCISIEDEMDVAPLNLGMIAAYYYINYTTIELFSMSLNAKTKVRGLIEIISNAAEYENIPIRHHEDNLLRQLAQKVPHKLNNPKFNDPHVKTNLLLQAHLSRMQLSAELQSDTEEILSKAIRLIQACVDVLSSNGWLSPALAAMELAQMVTQAMWSKDSYLKQLPHFTSEHIKRCTDKGVESVFDIMEMEDEERNALLQLTDSQIADVARFCNRYPNIELSYEVVDKDSIRSGGPVVVLVQLEREEEVTGPVIAPLFPQKREEGWWVVIGDAKSNSLISIKRLTLQQKAKVKLDFVAPATGAHNYTLYFMSDAYMGCDQEYKFSVDVKEAETDSDSD

SEQ ID NO: 60 - protein, 87 aa, Homo Sapiens [sequence omitted]

SEQ ID NO: 61 - protein, 252 aa, Homo Sapiens
MVSWIISRLVVLIFGTLYPAYSSYKAVKTKNVKEYVKWMMYWIVFAFFTTAETLTDIVLSWFPFYFELKIAFVIWLLSPYTKGSSVLYRKFVHPTLSNKEKEIDEYITQARDKSYETMMRVGKRGLNLAANAAVTAAAKGVLSEKLRSFSMQDLTLIRDEDALPLQRPDGRLRPSPGSLLDTIEDLGDDPALSLRSSTNPADSRTEASEDDMGDKAPKRAKPIKKAPKAEPLASKTLKTRPKKKTSGGGDSA

SEQ ID NO: 62 - protein, 764 aa, Homo Sapiens
MNGEADCPTDLEMAAPKGQDRWSQEDMLTLLECMKNNLPSNDSSKFKTTESHMDWEKVAFKDFSGDMCKLKWVEISNEVRKFRTLTELILDAQEHVKNPYKGKKLKKHPDFPKKPLTPYFRFFMEKRAKYAKLHPEMSNLDLTKILSKKYKELPEKKKMKYIQDFQREKQEFERNLARFREDHPDLIQNAKKSDIPEKPKTPQQLWYTHEKKVYLKVRPDATTKEVKDSLGKQWSQLSDKKRLKWIHKALEQRKEYEEIMRDYIQKHPELNISEEGITKSTLTKAERQLKDKFDGRPTKPPPNSYSLYCAELMANMKDVPSTERMVLCSQQWKLLSQKEKDAYHKKCDQKKKDYEVELLRFLESLPEEEQQRVLGEEKMLNINKKQATSPASKKPAQEGGKGGSEKPKRPVSAMFIFSEEKRRQLQEERPELSESELTRLLARMWNDLSEKKKAKYKAREAALKAQSERKPGGEREERGKLPESPKRAEEIWQQSVIGDYLARFKNDRVKALKAMEMTWNNMEKKEKLMWIKKAAEDQKRYERELSEMRAPPAATNSSKKMKFQGEPKKPPMNGYQKFSQELLSNGELNHLPLKERMVEIGSRWQRISQSQKEHYKKLAEEQQKQYKVHLDLWVKSLSPQDRAAYKEYISNKRKSMTKLRGPNPKSSRTTLQSKSESEEDDEEDEDDEDEDEEEEDDENGDSSEDGGDSSESSSEDESEDGDENEEDDEDEDDDEDDDEDEDNESEGSSSSSSSSGDSSDSDSN

SEQ ID NO: 63 - protein, 288 aa, Homo Sapiens
MSDSGEQNYGERESRSASRSGSAHGSGKSARHTPARSRSKEDSRRSRSKSRSRSESRSRSRRSSRRHYTRSRSRSRSHRRSRSRSYSRDYRRRHSHSHSPMSTRRRHVGNRANPDPNCCLGVFGLSLYTTERDLREVFSKYGPIADVSIVYDQQSRRSRGFAFVYFENVDDAKEAKERANGMELDGRRIRVDFSITKRPHTPTPGIYMGRPTYGSSRRRDYYDRGYDRGYDDRDYYSRSYRGGGGGGGGWRAAQDRDQIYRRRSPSPYYSRGGYRSRSRSRSYSPRRY

SEQ ID NO: 64 - protein, 792 aa, Homo Sapiens
MQGEDARYLKRKVKGGNIDVHPSEKALIVHYEVEATILGEMGDPMLGERKECQKIIRLKSLNANTDITSLARKVVEECKLIHPSKLNEVEQLLYYLQNRRDSLSGKEKKEKSSKPKDPPPFEGMEIDEVANINDMDEYIELLYEDIPDKVRGSALILQLARNPDNLEELLLNETALGALARVLREDWKQSVELATNIIYIFFCFSSFSQFHGLITHYKIGALCMNIIDHELKRHELWQEELSKKKKAVDEDPENQTLRKDYEKTFKKYQGLVVKQEQLLRVALYLLLNLAEDTRTELKMRNKNIVHMLVKALDRDNFELLILVVSFLKKLSIFMENKNDMVEMDIVEKLVKMIPCEHEDLLNITLRLLLNLSFDTGLRNKMVQVGLLPKLTALLGNDNYKQIAMCVLYHISMDDRFKSMFAYTDCIPQLMKMLFECSDERIDLELISFCINLAANKRNVQLICEGNGLKMLMKRALKFKDPLLMKMIRNISQHDGPTKNLFIDYVGDLAAQISNDEEEEFVIECLGTLANLTIPDLDWELVLKEYKLVPYLKDKLKPGAAEDDLVLEVVIMIGTVSMDDSCAALLAKSGIIPALIELLNAQQEDDEFVCQIIYVFYQMVFHQATRDVIIKETQAPAYLIDLMHDKNNEIRKVCDNTLDIIAEYDEEWAKKIQSEKFRWHNSQWLEMVESRQMDESEQYLYGDDRIEPYIHEGDILERPDLFYNSDGLIASEGAISPDFFNDYHLQNGDVVGQHSFPGSLGMDGFGQPVGILGRPATAYGFRPDEPYYYGYGS

SEQ ID NO: 65 - protein, 585 aa, Homo Sapiens
MAPSTPLLTVRGSEGLYMVNGPPHFTESTVFPRESGKNCKVCIFSKDGTLFAWGNGEKVNIISVTNKGLLHSFDLLKAVCLEFSPKNTVLATWQPYTTSKDGTAGIPNLQLYDVKTGTCLKSFIQKKMQNWCPSWSEDETLCARNVNNEVHFFENNNFNTIANKLHLQKINDFVLSPGPQPYKVAVYVPGSKGAPSFVRLYQYPNFAGPHAALANKSFFKADKVTMLWNKKATAVLVIASTDVDKTGASYYGEQTLHYIATNGESAVVQLPKNGPIYDVVWNSSSTEFCAVYGFMPAKATIFNLKCDPVFDFGTGPRNAAYYSPHGHILVLAGFGNLRGQMEVWDVKNYKLISKPVASDSTYFAWCPDGEHILTATCAPRLRVNNGYKIWHYTGSILHKYDVPSNAELWQVSWQPFLDGIFPAKTITYQAVPSEVPNEEPKVATAYRPPALRNKPITNSKLHEEEPPQNMKPQSGNDKPLSKTALKNQRKHEAKKAAKQEARSDKSPDLAPTPAPQSTPRNTVSQSISGDPEIDKKIKNLKKKLKAIEQLKEQAATGKQLEKNQLEKIQKETALLQELEDLELGI

SEQ ID NO: 66 - protein, 258 aa, Homo Sapiens
MARPPVPGSVVVPNWHESAEGKEYLACILRKNRRRVFGLLERPVLLPPVSIDTASYKIFVSGKSGVGKTALVAKLAGLEVPVVHHETTGIQTTVVFWPAKLQASSRVVMFRFEFWDCGESALKKFDHMLLACMENTDAFLFLFSFTDRASFEDLPGQLARIAGEAPGVVRMVIGSKFDQYMHTDVPERDLTAFRQAWELPLLRVKSVPGRRLADGRTLDGRAGLADVAHILNGLAEQLWHQDQVAAGLLPNPPESAPE

SEQ ID NO: 67 - protein, 1023 aa, Homo Sapiens
MGKGVGRDKYEPAAVSEQGDKKGKKGKKDRDMDELKKEVSMDDHKLSLDELHRKYGTDLSRGLTSARAAEILARDGPNALTPPPTTPEWIKFCRQLFGGFSMLLWIGAILCFLAYSIQAATEEEPQNDNLYLGVVLSAVVIITGCFSYYQEAKSSKIMESFKNMVPQQALVIRNGEKMSINAEEVVVGDLVEVKGGDRIPADLRIISANGCKVDNSSLTGESEPQTRSPDFTNENPLETRNIAFFSTNCVEGTARGIVVYTGDRTVMGRIATLASGLEGGQTPIAAEIEHFIHIITGVAVFLGVSFFILSLILEYTWLEAVIFLIGIIVANVPEGLLATVTVCLTLTAKRMARKNCLVKNLEAVETLGSTSTICSDKTGTLTQNRMTVAHMWFDNQIHEADTTENQSGVSFDKTSATWLALSRIAGLCNRAVFQANQENLPILKRAVAGDASESALLKCIELCCGSVKEMRERYAKIVEIPFNSTNKYQLSIHKNPNTSEPQHLLVMKGAPERILDRCSSILLHGKEQPLDEELKDAFQNAYLELGGLGERVLGFCHLFLPDEQFPEGFQFDTDDVNFPIDNLCFVGLISMIDPPRAAVPDAVGKCRSAGIKVIMVTGDHPITAKAIAKGVGIISEGNETVEDIAARLNIPVSQVNPRDAKACVVHGSDLKDMTSEQLDDILKYHTEIVFARTSPQQKLIIVEGCQRQGAIVAVTGDGVNDSPALKKADIGVAMGIAGSDVSKQAADMILLDDNFASIVTGVEEGRLIFDNLKKSIAYTLTSNIPEITPFLIFIIANIPLPLGTVTILCIDLGTDMVPAISLAYEQAESDIMKRQPRNPKTDKLVNERLISMAYGQIGMIQALGGFFTYFVILAENGFLPIHLLGLRVDWDDRWINDVEDSYGQQWTYEQRKIVEFTCHTAFFVSIVVVQWADLVICKTRRNSVFQQGMKNKILIFGLFEETALAAFLSYCPGMGVALRMYPLKPTWWFCAFPYSLLIFVYDEVRKLIIRRRPGGWVEKETYY

SEQ ID NO: 68 - protein, 111 aa, Homo Sapiens
MANIHQENEEMEQPMQNGEEDRPLGGGEGHQPAGNRRGQARRLAPNFRWAIPNRQINDGMGGDGDDMEIFMEEMREIRRKLRELQLRNCLRILMGELSNHHDHHDEFCLMP

SEQ ID NO: 69 - protein, 534 aa, Homo Sapiens
MLSPVSRDASDALQGRKCLRPRSRRLPLPAAVRAHGPMAELTDSARGCVVFEDVFVYFSREEWELLDDAQRLLYHDVMLENFALLASLGIAFSRSRAVMKLERGEEPWVYDQVDMTSATEREAQRGLRPGCWHGVEDEEVSSEQSIFVAGVSEVRTLMAELESHPCDICGPILKDTLHLAKYHGGKARQKPYLCGACGKQFWFSTDFDQHQNQPNGGKLFPRKEGRDSVKSCRVHVPEKTLTCGKGRRDFSATSGLLQHQASLSSMKPHKSTKLVSGFLMGQRYHRCGECGKAFTRKDTLARHQRIHTGERPYECNECGKFFSQSYDLFKHQTVHTGERPYECSECGKFFRQISGLIEHRRVHTGERLYQCGKCGKFFSSKSNLIRHQEVHTGARPYVCSECGKEFSRKHTLVLHQRTHTGERPYECSECGKAFSQSSHLNVHWRIHSSDYECSRCGKAFSCISKLIQHQKVHSGEKPYECSKCGKAFTQRPNLIRHWKVHTGERPYVCSECGREFIRKQTLVLHQRVHAGEKL

SEQ ID NO: 70 - protein, 419 aa, Homo Sapiens
MAKEGVEKAEETEQMIEKEAGKEPAEGGGGDGSHRLGDAQEMRAVVLAGFGGLNKLRLFRKAMPEPQDGELKIRVKACGLNFIDLMVRQGNIDNPPKTPLVPGFECSGIVEALGDSVKGYEIGDRVMAFVNYNAWAEVVCTPVEFVYKIPDDMSFSEAAAFPMNFVTAYVMLFEVANLREGMSVLVHSAGGGVGQAVAQLCSTVPNVTVFGTASTFKHEAIKDSVTHLFDRNADYVQEVKRISAEGVDIVLDCLCGDNTGKGLSLLKPLGTYILYGSSNMVTGETKSFFSFAKSWWQVEKVNPIKLYEENKVIAGFSLLNLLFKQGRAGLIRGVVEKLIGLYNQKKIKPVVDSLWALEEVKEAMQRIHDRGNIGKLILDVEKTPTPLMANDSTETSEAGEEEEDHEGDSENKERMPFIQ

SEQ ID NO: 71 - protein, 826 aa, Homo Sapiens
MWALCSLLRSAAGRTMSQGRTISQAPARRERPRKDPLRHLRTREKRGPSGCSGGPNTVYLQVVAAGSRDSGAALYVFSEFNRYLFNCGEGVQRLMQEHKLKVARLDNIFLTRMHWSNVGGLSGMILTLKETGLPKCVLSGPPQLEKYLEAIKIFSGPLKGIELAVRPHSAPEYEDETMTVYQIPIHSEQRRGKHQPWQSPERPLSRLSPERSSDSESNENEPHLPHGVSQRRGVRDSSLVVAFICKLHLKRGNFLVLKAKEMGLPVGTAAIAPIIAAVKDGKSITHEGREILAEELCTPPDPGAAFVVVECPDESFIQPICENATFQRYQGKADAPVALVVHMAPASVLVDSRYQQWMERFGPDTQHLVLNENCASVHNLRSHKIQTQLNLIHPDIFPLLTSFRCKKEGPTLSVPMVQGECLLKYQLRPRREWQRDAIITCNPEEFIVEALQLPNFQQSVQEYRRSAQDGPAPAEKRSQYPEIIFLGTGSAIPMKIRNVSATLVNISPDTSLLLDCGEGTFGQLCRHYGDQVDRVLGTLAAVFVSHLHADHHTGLPSILLQRERALASLGKPLHPLLVVAPNQLKAWLQQYHNQCQEVLHHISMIPAKCLQEGAEISSPAVERLISSLLRTCDLEEFQTCLVRHCKHAFGCALVHTSGWKVVYSGDTMPCEALVRMGKDATLLIHEATLEDGLEEEAVEKTHSTTSQAISVGMRMNAEFIMLNHFSQRYAKVPLFSPNFSEKVGVAFDHMKVCFGDFPTMPKLIPPLKALFAGDIEEMEERREKRELRQVRAALLSRELAGGLEDGEPQQKRAHTEEPQAKKVRAQ

SEQ ID NO: 72 - protein, 329 aa, Homo Sapiens
MAEAATPGTTATTSGAGAAAATAAAASPTPIPTVTAPSLGAGGGGGGSDGSGGGWTKQVTCRYFMHGVCKEGDNCRYSHDLSDSPYSVVCKYFQRGYCIYGDRCRYEHSKPLKQEEATATELTTKSSLAASSSLSSIVGPLVEMNTGEAESRNSNFATVGAGSEDWVNAIEFVPGQPYCGRTAPSCTEAPLQGSVTKEESEKEQTAVETKKQLCPYAAVGECRYGENCVYLHGDSCDMCGLQVLHPMDAAQRSQHIKSCIEAHEKDMELSFAVQRSKDMVCGICMEVVYEKANPSERRFGILSNCNHTYCLKCIRKWRSAKQFESKIIK

SEQ ID NO: 73 - protein, 557 aa, Homo Sapiens
MPERDSEPFSNPLAPDGHDVDDPHSFHQSKLTNEDFRKLLMTPRAAPTSAPPSKSRHHEMPREYNEDEDPAARRRKKKSYYAKLRQQEIERERELAEKYRDRAKERRDGVNKDYEETELISTTANYRAVGPTAEADKSAAEKRRQLIQESKFLGGDMEHTHLVKGLDFALLQKVRAEIASKEKEEEELMEKPQKETKKDEDPENKIEFKTRLGRNVYRMLFKSKAYERNELFLPGRMAYVVDLDDEYADTDIPTTLIRSKADCPTMEAQTTLTTNDIVISKLTQILSYLRQGTRNKKLKKKDKGKLEEKKPPEADMNIFEDIGDYVPSTTKTPRDKERERYRERERDRERDRDRDRERERERDRERERERDREREEEKKRHSYFEKPKVDDEPMDVDKGPGSTKELIKSINEKFAGSAGWEGTESLKKPEDKKQLGDFFGMSNSYAECYPATMDDMAVDSDEEVDYSKMDQGNKKGPLGRWDFDTQEEYSEYMNNKEALPKAAFQYGIKMSEGRKTRRFKETNDKAELDRQWKKISAIIEKRKKMEADGVEVKRPKY

SEQ ID NO: 74 - protein, 1504 aa, Homo Sapiens
MATARTFGPEREAEPAKEARVVGSELVDTYTVYIIQVTDGSHEWTVKHRYSDFHDLHEKLVAERKIDKNLLPPKKIIGKNSRSLVEKREKDLEVYLQKLLAAFPGVTPRVLAHFLHFHFYEINGITAALAEELFEKGEQLLGAGEVFAIGPLQLYAVTEQLQQGKPTCASGDAKTDLGHILDFTCRLKYLKVSGTEGPFGTSNIQEQLLPFDLSIFKSLHQVEISHCDAKHIRGLVASKPTLATLSVRFSATSMKEVLVPEASEFDEWEPEGTTLEGPVTAVIPTWQALTTLDLSHNSISEIDESVKLIPKIEFLDLSHNGLLVVDNLQHLYNLVHLDLSYNKLSSLEGLHTKLGNIKTLNLAGNLLESLSGLHKLYSLVNLDLRDNRIEQMEEVRSIGSLPCLEHVSLLNNPLSIIPDYRTKVLAQFGERASEVCLDDTVTTEKELDTVEVLKAIQKAKEVKSKLSNPEKKGGEDSRLSAAPCIRPSSSPPTVAPASASLPQPILSNQGIMFVQEEALASSLSSTDSLTPEHQPIAQGCSDSLESIPAGQAASDDLRDVPGAVGGASPEHAEPEVQVVPGSGQIIFLPFTCIGYTATNQDFIQRLSTLIRQAIERQLPAWIEAANQREEGQGEQGEEEDEEEEEEEDVAENRYFEMGPPDVEEEEGGGQGEEEEEEEEDEEAEEERLALEWALGADEDFLLEHIRILKVLWCFLIHVQGSIRQFAACLVLTDFGIAVFEIPHQESRGSSQHILSSLRFVFCFPHGDLTEFGFLMPELCLVLKVRHSENTLFIISDAANLHEFHADLRSCFAPQHMAMLCSPILYGSHTSLQEFLRQLLTFYKVAGGCQERSQGCFPVYLVYSDKRMVQTAAGDYSGNIEWASCTLCSAVRRSCCAPSEAVKSAAIPYWLLLTPQHLNVIKADFNPMPNRGTHNCRNRNSFKLSRVPLSTVLLDPTRSCTQPRGAFADGHVLELLVGYRFVTAIFVLPHEKFHFLRVYNQLRASLQDLKTVVIAKTPGTGGSPQGSFADGQPAERRASNDQRPQEVPAEALAPAPAEVPAPAPAAASASGPAKTPAPAEASTSALVPEETPVEAPAPPPAEAPAQYPSEHLIQATSEENQIPSHLPACPSLRHVASLRGSAIIELFHSSIAEVENEELRHLMWSSVVFYQTPGLEVTACVLLSTKAVYFVLHDGLRRYFSEPLQDFWHQKNTDYNNSPFHISQCFVLKLSDLQSVNVGLFDQHFRLTGSTPMQVVTCLTRDSYLTHCFLQHLMVVLSSLERTPSPEPVDKDFYSEFGNKTTGKMENYELIHSSRVKFTYPSEEEIGDLTFTVAQKMAEPEKAPALSILLYVQAFQVGMPPPGCCRGPLRPKTLLLTSSEIFLLDEDCVHYPLPEFAKEPPQRDRYRLDDGRRVRDLDRVLMGYQTYPQALTLVFDDVQGHDLMGSVTLDHFGEVPGGPARASQGREVQWQVFVPSAESREKLISLLARQWEALCGRELPVELTG

SEQ ID NO: 75 - protein, 525 aa, Homo Sapiens
MHRAPSPTAEQPPGGGDSARRTLQPRLKPSARAMALPRTLGELQLYRVLQRANLLSYYETFIQQGGDDVQQLCEAGEEEFLEIMALVGMATKPLHVRRLQKALREWATNPGLFSQPVPAVPVSSIPLFKISETAGTRKGSMSNGHGSPGEKAGSARSFSPKSPLELGEKLSPLPGGPGAGDPRIWPGRSTPESDVGAGGEEEAGSPPFSPPAGGGVPEGTGAGGLAAGGTGGGPDRLEPEMVRMVVESVERIFRSFPRGDAGEVTSLLKLNKKLARSVGHIFEMDDNDSQKEEEIRKYSIIYGRFDSKRREGKQLSLHELTINEAAAQFCMRDNTLLLRRVELFSLSRQVARESTYLSSLKGSRLHPEELGGPPLKKLKQEVGEQSHPEIQQPPPGPESYVPPYRPSLEEDSASLSGESLDGHLQAVGSCPRLTPPPADLPLALPAHGLWSRHILQQTLMDEGLRLARLVSHDRVGRLSPCVPAKPPLAEFEEGLLDRCPAPGPHPALVEGRRSSVKVEAEASRQ

SEQ ID NO: 76 - protein, 1230 aa, Homo Sapiens
MSALCWGRGAAGLKRALRPCGRPGLPGKEGTAGGVCGPRRSSSASPQEQDQDRRKDWGHVELLEVLQARVRQLQAESVSEVVVNRVDVARLPECGSGDGSLQPPRKVQMGAKDATPVPCGRWAKILEKDKRTQQMRMQRLKAKLQMPFQSGEFKALTRRLQVEPRLLSKQMAGCLEDCTRQAPESPWEEQLARLLQEAPGKLSLDVEQAPSGQHSQAQLSGQQQRLLAFFKCCLLTDQLPLAHHLLVVHHGQRQKRKLLTLDMYNAVMLGWARQGAFKELVYVLFMVKDAGLTPDLLSYAAALQCMGRQDQDAGTIERCLEQMSQEGLKLQALFTAVLLSEEDRATVLKAVHKVKPTFSLPPQLPPPVNTSKLLRDVYAKDGRVSYPKLHLPLKTLQCLFEKQLHMELASRVCVVSVEKPTLPSKEVKHARKTLKTLRDQWEKALCRALRETKNRLEREVYEGRFSLYPFLCLLDEREVVRMLLQVLQALPAQGESFTTLARELSARTFSRHVVQRQRVSGQVQALQNHYRKYLCLLASDAEVPEPCLPRQYWEELGAPEALREQPWPLPVQMELGKLLAEMLVQATQMPCSLDKPHRSSRLVPVLYHVYSFRNVQQIGILKPHPAYVQLLEKAAEPTLTFEAVDVPMLCPPLPWTSPHSGAFLLSPTKLMRTVEGATQHQELLETCPPTALHGALDALTQLGNCAWRVNGRVLDLVLQLFQAKGCPQLGVPAPPSEAPQPPEAHLPHSAAPARKAELRRELAHCQKVAREMHSLRAEALYRLSLAQHLRDRVFWLPHNMDFRGRTYPCPPHFNHLGSDVARALLEFAQGRPLGPHGLDWLKIHLVNLTGLKKREPLRKRLAFAEEVMDDILDSADQPLTGRKWWMGAEEPWQTLACCMEVANAVRASDPAAYVSHLPVHQDGSCNGLQHYAALGRDSVGAASVNLEPSDVPQDVYSGVAAQVEVFRRQDAQRGMRVAQVLEGFITRKVVKQTVMTVVYGVTRYGGRLQIEKRLRELSDFPQEFVWEASHYLVRQVFKSLQEMFSGTRAIQHWLTESARLISHMGSVVEWVTPLGVPVIQPYRLDSKVKQIGGGIQSITYTHNGDISRKPNTRKQKNGFPPNFIHSLDSSHMMLTALHCYRKGLTFVSVHDCYWTHAADVSVMNQVCREQFVRLHSEPILQDLSRFLVKRFCSEPQKILEASQLKETLQAVPKPGAFDLEQVKRSTYFFS

SEQ ID NO: 77 - protein, 746 aa, Homo Sapiens
MAGSRGAGRTAAPSVRPEKRRSEPELEPEPEPEPPLLCTSPLSHSTGSDSGVSDSEESVFSGLEDSGSDSSEDDDEGDEEGEDGALDDEGHSGIKKTTEEQVQASTPCPRTEMASARIGDEYAEDSSDEEDIRNTVGNVPLEWYDDFPHVGYDLDGRRIYKPLRTRDELDQFLDKMDDPDYWRTVQDPMTGRDLRLTDEQVALVRRLQSGQFGDVGFNPYEPAVDFFSGDVMIHPVTNRPADKRSFIPSLVEKEKVSRMVHAIKMGWIQPRRPRDPTPSFYDLWAQEDPNAVLGRHKMHVPAPKLALPGHAESYNPPPEYLLSEEERLAWEQQEPGERKLSFLPRKFPSLRAVPAYGRFIQERFERCLDLYLCPRQRKMRVNVDPEDLIPKLPRPRDLQPFPTCQALVYRGHSDLVRCLSVSPGGQWLVSGSDDGSLRLWEVATARCVRTVPVGGVVKSVAWNPSPAVCLVAAAVEDSVLLLNPALGDRLVAGSTDQLLSAFVPPEEPPLQPARWLEASEEERQVGLRLRICHGKPVTQVTWHGRGDYLAVVLATQGHTQVLIHQLSRRRSQSPFRRSHGQVQRVAFHPARPFLLVASQRSVRLYHLLRQELTKKLMPNCKWVSSLAVHPAGDNVICGSYDSKLVWFDLDLSTKPYRMLRHHKKALRAVAFHPRYPLFASGSDDGSVIVCHGMVYNDLLQNPLLVPVKVLKGHVLTRDLGVLDVIFHPTQPWVFSSGADGTVRLFT

SEQ ID NO: 78 - protein, 175 aa, Homo Sapiens
MPKSCAARQCCNRYSSRRKQLTFHRFPFSRPELLKEWVLNIGRGNFKPKQHTVICSEHFRPECFSAFGNRKNLKHNAVPTVFAFQDPTQQVRENTDPASERGNASSSQKEKTSPCRSQVLPEAGAGEDSPGRNMDTALEELQLPPNAEGHVKQAMLFNVENGTPASREALWLSEE

SEQ ID NO: 79 - protein, 688 aa, Homo Sapiens
MDGSFVQHSVRVLQELNKQREKGQYCDATLDVGGLVFKAHWSVLACCSHFFQSLYGDGSGGSVVLPAGFAEIFGLLLDFFYTGHLALTSGNRDQVLLAARELRVPEAVELCQSFKPKTSVGQAAGGQSGLGPPASQNVNSHVKEPAGLEEEEVSRTLGLVPRDQEPRGSHSPQRPQLHSPAQSEGPSSLCGKLKQALKPCPLEDKKPEDCKVPPRPLEAEGAQLQGGSNEWEVVVQVEDDGDGDYMSEPEAVLTRRKSNVIRKPCAAEPALSAGSLAAEPAENRKGTAVPVECPTCHKKFLSKYYLKVHNRKHTGEKPFECPKCGKCYFRKENLLEHEARNCMNRSEQVFTCSVCQETFRRRMELRVHMVSHTGEMPYKCSSCSQQFMQKKDLQSHMIKLHGAPKPHACPTCAKCFLSRTELQLHEAFKHRGEKLFVCEECGHRASSRNGLQMHIKAKHRNERPHVCEFCSHAFTQKANLNMHLRTHTGEKPFQCHLCGKTFRTQASLDKHNRTHTGERPFSCEFCEQRFTEKGPLLRHVASRHQEGRPHFCQICGKTFKAVEQLRVHVRRHKGVRKFECTECGYKFTRQAHLRRHMEIHDRVENYNPRQRKLRNLIIEDEKMVVVALQPPAELEVGSAEVIVESLAQGGLASQLPGQRLCAEESFTGPGVLEPSLIITAAVPEDCDT

SEQ ID NO: 80 - protein, 329 aa, Homo Sapiens
MAFQLSRIMRPDDANVAGNVHGGTILKMIEEAGAIISTRHCNSQNGERCVAALARVERTDFLSPMCIGEVAHVSAEITYTSKHSVEVQVNVMSENILTGAKKLTNKATLWYVPLSLKNVDKVLEVPPVVYSRQEQEEEGRKRYEAQKLERMETKWRNGDIVQPVLNPEPNTVSYSQSSLIHLVGPSDCTLHGFVHGGVTMKLMDEVAGIVAARHCKTNIVTASVDAINFHDKIRKGCVITISGRMTFTSNKSMEIEVLVDADPVVDSSQKRYRAASAFFTYVSLSQEGRSLPVPQLVPETEDEKKRFEEGKGRYLQMKAKRQGHAEPQP

SEQ ID NO: 81 - protein, 200 aa, Homo Sapiens
MAQQRALPQSKETLLQSYNKRLKDDIKSIMDNFTEIIKTAKIEDETQVSRATQGEQDNYEMHVRAANIVRAGESLMKLVSDLKQFLILNDFPSVNEAIDQRNQQLRTLQEECDRKLITLRDEISIDLYELEEEYYSSSSSLCEANDLPLCEAYGRLDLDTDSADGLSAPLLASPEPSAGPLQVAAPAHSHAGGPGPTEHA

SEQ ID NO: 82 - protein, 3267 aa, Homo Sapiens
MQKARGTRGEDAGTRAPPSPGVPPKRAKVGAGGGAPVAVAGAPVFLRPLKNAAVCAGSDVRLRVVVSGTPQPSLRWFRDGQLLPAPAPEPSCLWLRRCGAQDAGVYSCMAQNERGRASCEAVLTVLEVGDSETAEDDISDVQGTQRLELRDDGAFSTPTGGSDTLVGTSLDTPPTSVTGTSEEQVSWWGSGQTVLEQEAGSGGGTRRLPGSPRQAQATGAGPRHLGVEPLVRASRANLVGASWGSEDSLSVASDLYGSAFSLYRGRALSIHVSVPQSGLRREEPDLQPQLASEAPRRPAQPPPSKSALLPPPSPRVGKRSPPGPPAQPAATPTSPHRRTQEPVLPEDTTTEEKRGKKSKSSGPSLAGTAESRPQTPLSEASGRLSALGRSPRLVRAGSRILDKLQFFEERRRSLERSDSPPAPLRPWVPLRKARSLEQPKSERGAPWGTPGASQEELRAPGSVAERRRLFQQKAASLDERTRQRSPASDLELRFAQELGRIRRSTSREELVRSHESLRATLQRAPSPREPGEPPLFSRPSTPKTSRAVSPAAAQPPSPSSAEKPGDEPGRPRSRGPAGRTEPGEGPQQEVRRRDQFPLTRSRAIQECRSPVPPPAADPPEARTKAPPGRKREPPAQAVRFLPWATPGLEGAAVPQTLEKNRAGPEAEKRLRRGPEEDGPWGPWDRRGARSQGKGRRARPTSPELESSDDSYVSAGEEPLEAPVFEIPLQNVVVAPGADVLLKCIITANPPPQVSWHKDGSALRSEGRLLLRAEGERHTLLLREARAADAGSYMATATNELGQATCAASLTVRPGGSTSPFSSPITSDEEYLSPPEEFPEPGETWPRTPTMKPSPSQNRRSSDTGSKAPPTFKVSLMDQSVREGQDVIMSIRVQGEPKPVVSWLRNRQPVRPDQRRFAEEAEGGLCRLRILAAERGDAGFYTCKAVNEYGARQCEARLEVRAHPESRSLAVLAPLQDVDVGAGEMALFECLVAGPTDVEVDWLCRGRLLQPALLKCKMHFDGRKCKLLLTSVHEDDSGVYTCKLSTAKDELTCSARLTVRPSLAPLFTRLLEDVEVLEGRAARFDCKISGTPPPVVTWTHFGCPMEESENLRLRQDGGLHSLHIAHVGSEDEGLYAVSAVNTHGQAHCSAQLYVEEPRTAASGPSSKLEKMPSIPEEPEQGELERLSIPDFLRPLQDLEVGLAKEAMLECQVTGLPYPTISWFHNGHRIQSSDDRRMTQYRDVHRLVFPAVGPQHAGVYKSVIANKLGKAACYAHLYVTDVVPGPPDGAPQVVAVTGRMVTLTWNPPRSLDMAIDPDSLTYTVQHQVLGSDQWTALVTGLREPGWAATGLRKGVQHIFRVLSTTVKSSSKPSPPSEPVQLLEHGPTLEEAPAMLDKPDIVYVVEGQPASVTVTFNHVEAQVVWRSCRGALLEARAGVYELSQPDDDQYCLRICRVSRRDMGALTCTARNRHGTQTCSVTLELAEAPRFESIMEDVEVGAGETARFAVVVEGKPLPDIMWYKDEVLLTESSHVSFVYEENECSLVVLSTGAQDGGVYTCTAQNLAGEVSCKAELAVHSAQTAMEVEGVGEDEDHRGRRLSDFYDIHQEIGRGAFSYLRRIVERSSGLEFAAKFIPSQAKPKASARREARLLARLQHDCVLYFHEAFERRRGLVIVTELCTEELLERIARKPTVCESEIRAYMRQVLEGIHYLHQSHVLHLDVKPENLLVWDGAAGEQQVRICDFGNAQELTPGEPQYCQYGTPEFVAPEIVNQSPVSGVTDIWPVGVVAFLCLTGISPFVGENDRTTLMNIRNYNVAFEETTFLSLSREARGFLIKVLVQDRLRPTAEETLEHPWFKTQAKGAEVSTDHLKLFLSRRRWQRSQISYKCHLVLRPIPELLRAPPERVWVTMPRRPPPSGGLSSSSDSEEEELEELPSVPRPLQPEFSGSRVSLTDIPTEDEALGTPETGAATPMDWQEQGRAPSQDQEAPSPEALPSPGQEPAAGASPRRGELRRGSSAESALPRAGPRELGRGLHKAASVELPQRRSPSPGATRLARGGLGEGEYAQRLQALRQRLLRGGPEDGKVSGLRGPLLESLGGRARDPRMARAASSEAAPHHQPPLENRGLQKSSSFSQGEAEPRGRHRRAGAPLEIPVARLGARRLQESPSLSALSEAQPSSPARPSAPKPSTPKSAEPSATTPSDAPQPPAPQPAQDKAPEPRPEPVRASKPAPPPQALQTLALPLTPYAQIIQSLQLSGHAQGPSQGPAAPPSEPKPHAAVFARVASPPPGAPEKRVPSAGGPPVLAEKARVPTVPPRPGSSLSSSIENLESEAVFEAKFKRSRESPLSLGLRLLSRSRSEERGPFRGAEEEDGIYRPSPAGTPLELVRRPERSRSVQDLRAVGEPGLVRRLSLSLSQRLRRTPPAQRHPAWEARGGDGESSEGGSSARGSPVLAMRRRLSFTLERLSSRLQRSGSSEDSGGASGRSTPLFGRLRRATSEGESLRRLGLPHNQLAAQAGATTPSAESLGSEASATSGSSAPGESRSRLRWGFSRPRKDKGLSPPNLSASVQEELGHQYVRSESDFPPVFHIKLKDQVLLEGEAATLLCLPAACPAPHISWMKDKKSLRSEPSVIIVSCKDGRQLLSIPRAGKRHAGLYECSATNVLGSITSSCTVAVARVPGKLAPPEVPQTYQDTALVLWKPGDSRAPCTYTLERRVDGESVWHPVSSGIPDCYYNVTHLPVGVTVRFRVACANRAGQGPFSNSSEKVFVRGTQDSSAVPSAAHQEAPVTSRPARARPPDSPTSLAPPLAPAAPTPPSVTVSPSSPPTPPSQALSSLKAVGPPPQTPPRRHRGLQAARPAEPTLPSTHVTPSEPKPFVLDTGTPIPASTPQGVKPVSSSTPVYVVTSFVSAPPAPEPPAPEPPPEPTKVTVQSLSPAKEVVSSPGSSPRSSPRPEGTTLRQGPPQKPYTFLEEKARGRFGVVRACRENATGRTFVAKIVPYAAEGKRRVLQEYEVLRTLHHERIMSLHEAYITPRYLVLIAESCGNRELLCGLSDRFRYSEDDVATYMVQLLQGLDYLHGHHVLHLDIKPDNLLLAPDNALKIVDFGSAQPYNPQALRPLGHRTGTLEFMAPEMVKGEPIGSATDIWGAGVLTYIMLSGRSPFYEPDPQETEARIVGGRFDAFQLYPNTSQSATLFLRKVLSVHPWSRPSLQDCLAHPWLQDAYLMKLRRQTLTFTTNRLKEFLGEQRRRRAEAATRHKVLLRSYPGGP

SEQ ID NO: 83 - protein, 455 aa, Homo Sapiens
MGACLGACSLLSCASCLCGSAPCILCSCCPASRNSTVSRLIFTFFLFLGVLVSIIMLSPGVESQLYKLPWVCEEGAGIPTVLQGHIDCGSLLGYRAVYRMCFATAAFFFFFTLLMLCVSSSRDPRAAIQNGFWFFKFLILVGLTVGAFYIPDGSFTNIWFYFGVVGSFLFILIQLVLLIDFAHSWNQRWLGKAEECDSRAWYAGLFFFTLLFYLLSIAAVALMFMYYTEPSGCHEGKVFISLNLTFCVCVSIAAVLPKVQDAQPNSGLLQASVITLYTMFVTWSALSSIPEQKCNPHLPTQLGNETVVAGPEGYETQWWDAPSIVGLIIFLLCTLFISLRSSDHRQVNSLMQTEECPPMLDATQQQQQVAACEGRAFDNEQDGVTYSYSFFHFCLVLASLHVMMTLTNWYKPGETRKMISTWTAVWVKICASWAGLLLYLWTLVAPLLLRNRDFS

SEQ ID NO: 84 - protein, 374 aa, Homo Sapiens
MSVPAFIDISEEDQAAELRAYLKSKGAEISEENSEGGLHVDLAQIIEACDVCLKEDDKDVESVMNSVVSLLLILEPDKQEALIESLCEKLVKFREGERPSLRLQLLSNLFHGMDKNTPVRYTVYCSLIKVAASCGAIQYIPTELDQVRKWISDWNLTTEKKHTLLRLLYEALVDCKKSDAASKVMVELLGSYTEDNASQARVDAHRCIVRALKDPNAFLFDHLLTLKPVKFLEGELIHDLLTIFVSAKLASYVKFYQNNKDFIDSLGLLHEQNMAKMRLLTFMGMAVENKEISFDTMQQELQIGADDVEAFVIDAVRTKMVYCKIDQTQRKVVVSHSTHRTFGKQQWQQLYDTLNAWKQNLNKVKNSLLSLSDT

SEQ ID NO: 85 - protein, 305 aa, Homo Sapiens
MERLVARGTFPVLVRTSACRSLFGPVDHEELSRELQARLAELNAEDQNRWDYDFQQDMPLRGPGRLQWTEVDSDSVPAFYRETVQVGRCRLLLAPRPVAVAVAVSPPLEPAAESLDGLEEAPEQLPSVPVPAPASTPPPVPVLAPAPAPAPAPVAAPVAAPVAVAVLAPAPAPAPAPAPAPAPVAAPAPAPAPAPAPAPAPAPAPDAAPQESAEQGANQGQRGQEPLADQLHSGISGRPAAGTAAASANGAAIKKLSGPLISDFFAKRKRSAPEKSSGDVPAPCPSPSAAPGVGSVEQTPRKRLR

SEQ ID NO: 86 - protein, 433 aa, Homo Sapiens
MATSGDCPRSESQGEEPAECSEAGLLQEGVQPEEFVAIADYAATDETQLSFLRGEKILILRQTTADWWWGERAGCCGYIPANHVGKHVDEYDPEDTWQDEEYFGSYGTLKLHLEMLADQPRTTKYHSVILQNKESLTDKVILDVGCGTGIISLFCAHYARPRAVYAVEASEMAQHTGQLVLQNGFADIITVYQQKVEDVVLPEKVDVLVSEWMGTCLLFEFMIESILYARDAWLKEDGVIWPTMAALHLVPCSADKDYRSKVLFWDNAYEFNLSALKSLAVKEFFSKPKYNHILKPEDCLSEPCTILQLDMRTVQISDLETLRGELRFDIRKAGTLHGFTAWFSVHFQSLQEGQPPQVLSTGPFHPTTHWKQTLFMMDDPVPVHTGDVVTGSVVLQRNPVWRRHMSVALSWAVTSRQDPTSQKVGEKVFPIWR

SEQ ID NO: 87 - protein, 339 aa, Homo Sapiens
MMDSQLVAGVAFKKTFSYAGFEMQPKKYHNPKIALLNVELELKAEKDNAEIRVHTVEDYQAIVDAEWNILYDKLEKIHHSGAKVVLSKLPIGDVATQYFADRDMFCAGRVPEEDLKRTMMACGGSIQTSVNALSADVLGRCQVFEETQIGGERYNFFTGCPKAKTCTFILRGGAEQFMEETERSLHDAIMIVRRAIKNDSVVAGGGAIEMELSKYLRDYSRTIPGKQQLLIGAYAKALEIIPRQLCDNAGFDATNILNKLRARHAQGGTWYGVDINNEDIADNFEAFVWEPAMVRINALTAASEAACLIVSVDETIKNPRSTVDAPTAAGRGRGRGRPH

SEQ ID NO: 88 - protein, 1063 aa, Homo Sapiens
MPHLPLASFRPPFWGLRHSRGLPRFHSVSTQSEPHGSPISRRNREAKQKRLREKQATLEAEIAGESKSPAESIKAWRPKELVLYEIPTKPGEKKDVSGPLPPAYSPRYVEAAWYPWWVREGFFKPEYQARLPQATGETFSMCIPPPNVTGSLHIGHALTVAIQDALVRWHRMRGDQVLWVPGSDHAGIATQAVVEKQLWKERGVRRHELSREAFLREVWQWKEAKGGEICEQLRALGASLDWDRECFTMDVGSSVAVTEAFVRLYKAGLLYRNHQLVNWSCALRSAISDIEVENRPLPGHTQLRLPGCPTPVSFGLLFSVAFPVDGEPDAEVVVGTTRPETLPGDVAVAVHPDDSRYTHLHGRQLRHPLMGQPLPLITDYAVQPHVGTGAVKVTPAHSPADAEMGARHGLSPLNVIAEDGTMTSLCGDWLQGLHRFVAREKIMSVLSEWGLFRGLQNHPMVLPICSRSGDVIEYLLKNQWFVRCQEMGARAAKAVESGALELSPSFHQKNWQHWFSHIGDWCVSRQLWWGHQIPAYLVVEDHAQGEEDCWVVGRSEAEAREVAAELTGRPGAELTLERDPDVLDTWFSSALFPFSALGWPQETPDLARFYPLSLLETGSDLLLFWVGRMVMLGTQLTGQLPFSKVLLHPMVRDRQGRKMSKSLGNVLDPRDIISGVEMQVLQEKLRSGNLDPAELAIVAAAQKKDFPHGIPECGTDALRFTLCSHGVQAGDLHLSVSEVQSCRHFCNKIWNALRFILNALGEKFVPQPAEELSPSSPMDAWILSRLALAAQECERGFLTRELSLVTHALHHFWLHNLCDVYLEAVKPVLWHSPRPLGPPQVLFSCADLGLRLLAPLMPFLAEELWQRLPPRPGCPPAPSISVAPYPSACSLEHWRQPELERRFSRVQEVVQVLRALRATYQLTKARPRVLLQSSEPGDQGLFEAFLEPLGTLGYCGAVGLLPPGAAAPSGWAQAPLSDTAQVYMELQGLVDPQIQLPLLAARRYKLQKQLDSLTARTPSEGEAGTQRQQKLSSLQLELSKLDKAASHLQQLMDEPPAPGSPEL

SEQ ID NO: 89 - protein, 217 aa, Homo Sapiens
MASTGLELLGMTLAVLGWLGTLVSCALPLWKVTAFIGNSIVVAQVVWEGLWMSCVVQSTGQMQCKVYDSLLALPQDLQAARALCVIALLLALLGLLVAITGAQCTTCVEDEGAKARIVLTAGVILLLAGILVLIPVCWTAHAIIQDFYNPLVAEALKRELGASLYLGWAAAALLMLGGGLLCCTCPPPQVERPRGPRLGYSIPSRSGASGLDKRDYV

SEQ ID NO: 90 - protein, 478 aa, Homo Sapiens
MVQKTSMSRGPYPPSQEIPMEVFDPSPQGKYSKRKGRFKRSDGSTSSDTTSNSFVRQGSAESYTSRPSDSDVSLEEDREALRKEAERQALAQLEKAKTKPVAFAVRTNVGYNPSPGDEVPVQGVAITFEPKDFLHIKEKYNNDWWIGRLVKEGCEVGFIPSPVKLDSLRLLQEQKLRQNRLGSSKSGDNSSSSLGDVVTGTRRPTPPASAKQKQKSTEHVPPYDVVPSMRPIILVGPSLKGYEVTDMMQKALFDFLKHRFDGRISITRVTADISLAKRSVLNNPSKHIIIERSNTRSSLAEVQSEIERIFELARTLQLVALDADTINHPAQLSKTSLAPIIVYIKITSPKVLQRLIKSRGKSQSKHLNVQIAASEKLAQCPPEMFDIILDENQLEDACEHLAEYLEAYWKATHPPSSTPPNPLLNRTMATAALAASPAPVSNLQVQVLTSLRRNLGFWGGLESSQRGSVVPQEQEHAM

SEQ ID NO: 91 - protein, 767 aa, Homo Sapiens
MSFDPNLLHNNGHNGYPNGTSAALRETGVIEKLLTSYGFIQCSERQARLFFHCSQYNGNLQDLKVGDDVEFEVSSDRRTGKPIAVKLVKIKQEILPEERMNGQEVFYLTYTPEDVEGNVQLETGDKINFVIDNNKHTGAVSARNIMLLKKKQARCQGVVCAMKEAFGFIERGDVVKEIFFHYSEFKGDLETLQPGDDVEFTIKDRNGKEVATDVRLLPQGTVIFEDISIEHFEGTVTKVIPKVPSKNQNDPLPGRIKVDFVIPKELPFGDKDTKSKVTLLEGDHVRFNISTDRRDKLERATNIEVLSNTFQFTNEAREMGVIAAMRDGFGFIKCVDRDVRMFFHFSEILDGNQLHIADEVEFTVVPDMLSAQRNHAIRIKKLPKGTVSFHSHSDHRFLGTVEKEATFSNPKTTSPNKGKEKEAEDGIIAYDDCGVKLTIAFQAKDVEGSTSPQIGDKVEFSISDKQRPGQQVATCVRLLGRNSNSKRLLGYVATLKDNFGFIETANHDKEIFFHYSEFSGDVDSLELGDMVEYSLSKGKGNKVSAEKVNKTHSVNGITEEADPTIYSGKVIRPLRSVDPTQTEYQGMIEIVEEGDMKGEVYPFGIVGMANKGDCLQKGESVKFQLCVLGQNAQTMAYNITPLRRATVECVKDQFGFINYEVGDSKKLFFHVKEVQDGIELQAGDEVEFSVILNQRTGKCSACNVWRVCEGPKAVAAPRPDRLVNRLKNITLDDASAPRLMVLRQPRGPDNSMGFGAERKIRQAGVID

SEQ ID NO: 92 - protein, 407 aa, Homo Sapiens
MSGGSADYNREHGGPEGMDPDGVIESNWNEIVDNFDDMNLKESLLRGIYAYGFEKPSAIQQRAIIPCIKGYDVIAQAQSGTGKTATFAISILQQLEIEFKETQALVLAPTRELAQQIQKVILALGDYMGATCHACIGGTNVRNEMQKLQAEAPHIVVGTPGRVFDMLNRRYLSPKWIKMFVLDEADEMLSRGFKDQIYEIFQKLNTSIQVVLLSATMPTDVLEVTKKFMRDPIRILVKKEELTLEGIKQFYINVEREEWKLDTLCDLYETLTITQAVIFLNTRRKVDWLTEKMHARDFTVSALHGDMDQKERDVIMREFRSGSSRVLITTDLLARGIDVQQVSLVINYDLPTNRENYIHRIGRGGRFGRKGVAINFVTEEDKRILRDIETFYNTTVEEMPMNVADLI

SEQ ID NO: 93 - protein, 359 aa, Homo Sapiens
MADQDPAGISPLQQMVASGTGAVVTSLFMTPLDVVKVRLQSQRPSMASELMPSSRLWSLSYTKLPSSLQSTGKCLLYCNGVLEPLYLCPNGARCATWFQDPTRFTGTMDAFVKIVRHEGTRTLWSGLPATLVMTVPATAIYFTAYDQLKAFLCGRALTSDLYAPMVAGALARLGTVTVISPLELMRTKLQAQHVSYRELGACVRTAVAQGGWRSLWLGWGPTALRDVPFSALYWFNYELVKSWLNGFRPKDQTSVGMSFVAGGISGTVAAVLTLPFDVVKTQRQVALGAMEAVRVNPLHVDSTWLLLRRIRAESGTKGLFAGFLPRIIKAAPSCAIMISTYEFGKSFFQRLNQDRLLGG

SEQ ID NO: 94 - protein, 1292 aa, Homo Sapiens
MADPAAPTPAAPAPAQAPAPAPEAVPAPAAAPVPAPAPASDSASGPSSDSGPEAGSQRLLFSHDLVSGRYRGSVHFGLVRLIHGEDSDSEGEEEGRGSSGCSEAGGAGHEEGRASPLRRGYVRVQWYPEGVKQHVKETKLKLEDRSVVPRDVVRHMRSTDSQCGTVIDVNIDCAVKLIGTNCIIYPVNSKDLQHIWPFMYGDYIAYDCWLGKVYDLKNQIILKLSNGARCSMNTEDGAKLYDVCPHVSDSGLFFDDSYGFYPGQVLIGPAKIFSSVQWLSGVKPVLSTKSKFRVVVEEVQVVELKVTWITKSFCPGGTDSVSPPPSVITQENLGRVKRLGCFDHAQRQLGERCLYVFPAKVEPAKIAWECPEKNCAQGEGSMAKKVKRLLKKQVVRIMSCSPDTQCSRDHSMEDPDKKGESKTKSEAESASPEETPDGSASPVEMQDEGAEEPHEAGEQLPPFLLKEGRDDRLHSAEQDADDEAADDTDDTSSVTSSASSTTSSQSGSGTSRKKSIPLSIKNLKRKHKRKKNKITRDFKPGDRVAVEVVTTMTSADVMWQDGSVECNIRSNDLFPVHHLDNNEFCPGDFVVDKRVQSCPDPAVYGVVQSGDHIGRTCMVKWFKLRPSGDDVELIGEEEDVSVYDIADHPDFRFRTTDIVIRIGNTEDGAPHKEDEPSVGQVARVDVSSKVEVVWADNSKTIILPQHLYNIESEIEESDYDSVEGSTSGASSDEWEDDSDSWETDNGLVEDEHPKIEEPPIPPLEQPVAPEDKGVVISEEAATAAVQGAVAMAAPMAGLMEKAGKDGPPKSFRELKEAIKILESLKNMTVEQLLTGSPTSPTVEPEKPTREKKFLDDIKKLQENLKKTLDNVAIVEEEKMEAVPDVERKEDKPEGQSPVKAEWPSETPVLCQQCGGKPGVTFTSAKGEVFSVLEFAPSNHSFKKIEFQPPEAKKFFSTVRKEMALLATSLPEGIMVKTFEDRMDLFSALIKGPTRTPYEDGLYLFDIQLPNIYPAVPPHFCYLSQCSGRLNPNLYDNGKVCVSLLGTWIGKGTERWTSKSSLLQVLISIQGLILVNEPYYNEAGFDSDRGLQEGYENSRCYNEMALIRVVQSMTQLVRRPPEVFEQEIRQHFSTGGWRLVNRIESWLETHALLEKAQALPNGVPKASSSPEPPAVAELSDSGQQEPEDGGPAPGEASQGSDSEGGAQGLASASRDHTDQTSETAPDASVPPSVKPKKRRKSYRSFLPEKSGYPDIGFPLFPLSKGFIKSIRGVLTQFRAALLEAGMPECTEDK

SEQ ID NO: 95 - protein, 305 aa, Homo Sapiens
MGIQTSPVLLASLGVGLVTLLGLAVGSYLVRRSRRPQVTLLDPNEKYLLRLLDKTTVSHNTKRFRFALPTAHHTLGLPVGKHIYLSTRIDGSLVIRPYTPVTSDEDQGYVDLVIKVYLKGVHPKFPEGGKMSQYLDSLKVGDVVEFRGPSGLLTYTGKGHFNIQPNKKSPPEPRVAKKLGMIAGGTGITPMLQLIRAILKVPEDPTQCFLLFANQTEKDIILREDLEELQARYPNRFKLWFTLDHPPKDWAYSKGFVTADMIREHLPAPGDDVLVLLCGPPPMVQLACHPNLDKLGYSQKMRFTY

SEQ ID NO: 96 - protein, 552 aa, Homo Sapiens
MLDHKDLEAEIHPLKNEERKSQENLGNPSKNEDNVKSAPPQSRLSRCRAAAFFLSLFLCLFVVFVVSFVIPCPDRPASQRMWRIDYSAAVIYDFLAVDDINGDRIQDVLFLYKNTNSSNNFSRSCVDEGFSSPCTFAAAVSGANGSTLWERPVAQDVALVECAVPQPRGSEAPSACILVGRPSSFIAVNLFTGETLWNHSSSFSGNASILSPLLQVPDVDGDGAPDLLVLTQEREEVSGHLYSGSTGHQIGLRGSLGVDGESGFLLHVTRTGAHYILFPCASSLCGCSVKGLYEKVTGSGGPFKSDPHWESMLNATTRRMLSHSSGAVRYLMHVPGNAGADVLLVGSEAFVLLDGQELTPRWTPKAAHVLRKPIFGRYKPDTLAVAVENGTGTDRQILFLDLGTGAVLCSLALPSLPGGPLSASLPTADHRSAFFFWGLHELGSTSETETGEARHSLYMFHPTLPRVLLELANVSTHIVAFDAVLFEPSRHAAYILLTGPADSEAPGLVSVIKHKVRDLVPSSRVVRLGEGGPDSDQAIRDRFSRLRYQSEA

SEQ ID NO: 97 - protein, 169 aa, Homo Sapiens
MLATRVFSLVGKRAISTSVCVRAHESVVKSEDFSLPAYMDRRDHPLPEVAHVKHLSASQKALKEKEKASWSSLSMDEKVELYRIKFKESFAEMNRGSNEWKTVVGGAMFFIGFTALVIMWQKHYVYGPLPQSFDKEWVAKQTKRMLDMKVNPIQGLASKWDYEKNEWKK

SEQ ID NO: 98 - protein, 504 aa, Homo Sapiens
MSLICSISNEVPEHPCVSPVSNHVYERRLIEKYIAENGTDPINNQPLSEEQLIDIKVAHPIRPKPPSATSIPAILKALQDEWDAVMLHSFTLRQQLQTTRQELSHALYQHDAACRVIARLTKEVTAAREALATLKPQAGLIVPQAVPSSQPSVVGAGEPMDLGELVGMTPEIIQKLQDKATVLTTERKKRGKTVPEELVKPEELSKYRQVASHVGLHSASIPGILALDLCPSDTNKILTGGADKNVVVFDKSSEQILATLKGHTKKVTSVVFHPSQDLVFSASPDATIRIWSVPNASCVQVVRAHESAVTGLSLHATGDYLLSSSDDQYWAFSDIQTGRVLTKVTDETSGCSLTCAQFHPDGLIFGTGTMDSQIKIWDLKERTNVANFPGHSGPITSIAFSENGYYLATAADDSSVKLWDLRKLKNFKTLQLDNNFEVKSLIFDQSGTYLALGGTDVQIYICKQWTEILHFTEHSGLTTGVAFGHHAKFIASTGMDRSLKFYSL

SEQ ID NO: 99 - protein, 418 aa, Homo Sapiens
MRSLLLLSAFCLLEAALAAEVKKPAAAAAPGTAEKLSPKAATLAERSAGLAFSLYQAMAKDQAVENILVSPVVVASSLGLVSLGGKATTASQAKAVLSAEQLRDEEVHAGLGELLRSLSNSTARNVTWKLGSRLYGPSSVSFADDFVRSSKQHYNCEHSKINFRDKRSALQSINEWAAQTTDGKLPEVTKDVERTDGALLVNAMFFKPHWDEKFHHKMVDNRGFMVTRSYTVGVMMMHRTGLYNYYDDEKEKLQIVEMPLAHKLSSLIILMPHHVEPLERLEKLLTKEQLKIWMGKMQKKAVAISLPKGVVEVTHDLQKHLAGLGLTEAIDKNKADLSRMSGKKDLYLASVFHATAFELDTDGNPFDQDIYGREELRSPKLFYADHPFIFLVRDTQSGSLLFIGRLVRPKGDKMRDEL

SEQ ID NO: 100 - protein, 973 aa, Homo Sapiens [sequence omitted]

SEQ ID NO: 101 - protein, 297 aa, Homo Sapiens
MASPQLCRALVSAQWVAEALRAPRAGQPLQLLDASWYLPKLGRDARREFEERHIPGAAFFDIDQCSDRTSPYDHMLPGAEHFAEYAGRLGVGAATHVVIYDASDQGLYSAPRVWWMFRAFGHHAVSLLDGGLRHWLRQNLPLSSGKSQPAPAEFRAQLDPAFIKTYEDIKENLESRRFQVVDSRATGRFRGTEPEPRDGIEPGHIPGTVNIPFTDFLSQEGLEKSPEEIRHLFQEKKVDLSKPLVATCGSGVTACHVALGAYLCGKPDVPIYDGSWVEWYMRARPEDVISEGRGKTH

SEQ ID NO: 102 - protein, 418 aa, Homo Sapiens
MATSEQSICQARASVMVYDDTSKKWVPIKPGQQGFSRINIYHNTASNTFRVVGVKLQDQQVVINYSIVKGLKYNQATPTFHQWRDARQVYGLNFASKEEATTFSNAMLFALNIMNSQEGGPSSQRQVQNGPSPDEMDIQRRQVMEQHQQQRQESLERRTSATGPILPPGHPSSAASAPVSCSGPPPPPPPPVPPPPTGATPPPPPPLPAGGAQGSSHDESSMSGLAAAIAGAKLRRVQRPEDASGGSSPSGTSKSDANRASSGGGGGGLMEEMNKLLAKRRKAASQSDKPAEKKEDESQMEDPSTSPSPGTRAASQPPNSSEAGRKPWERSNSVEKPVSSILSRTPSVAKSPEAKSPLQSQPHSRMKPAGSVNDMALDAFDLDRMKQEILEEVVRELHKVKEEIIDAIRQELSGISTT

SEQ ID NO: 103 - protein, 437 aa, Homo Sapiens
MSWSLHPRNLILYFYALLFLSSTCVAYVATRDNCCILDERFGSYCPTTCGIADFLSTYQTKVDKDLQSLEDILHQVENKTSEVKQLIKAIQLTYNPDESSKPNMIDAATLKSRKMLEEIMKYEASILTHDSSIRYLQEIYNSNNQKIVNLKEKVAQLEAQCQEPCKDTVQIHDITGKDCQDIANKGAKQSGLYFIKPLKANQQFLVYCEIDGSGNGWTVFQKRLDGSVDFKKNWIQYKEGFGHLSPTGTTEFWLGNEKIHLISTQSAIPYALRVELEDWNGRTSTADYAMFKVGPEADKYRLTYAYFAGGDAGDAFDGFDFGDDPSDKFFTSHNGMQFSTWDNDNDKFEGNCAEQDGSGWWMNKCHAGHLNGVYYQGGTYSKASTPNGYDNGIIWATWKTRWYSMKKTTMKIIPFNRLTIGEGQQHHLGGAKQAGDV

SEQ ID NO: 104 - protein, 540 aa, Homo Sapiens
MDSVAFEDVDVNFTQEEWALLDPSQKNLYRDVMWETMRNLASIGKKWKDQNIKDHYKHRGRNLRSHMLERLYQTKDGSQRGGIFSQFANQNLSKKIPGVKLCESIVYGEVSMGQSSLNRHIKDHSGHEPKEYQEYGEKPDTRNQCWKPFSSHHSFRTHEIIHTGEKLYDCKECGKTFFSLKRIRRHIITHSGYTPYKCKVCGKAFDYPSRFRTHERSHTGEKPYECQECGKAFTCITSVRRHMIKHTGDGPYKCKVCGKPFHSLSSFQVHERIHTGEKPFKCKQCGKAFSCSPTLRIHERTHTGEKPYECKQCGKAFSYLPSLRLHERIHTGEKPFVCKQCGKAFRSASTFQIHERTHTGEKPYECKECGEAFSCIPSMRRHMIKHTGEGPYKCKVCGKPFHSLSPFRIHERTHTGEKPYVCKHCGKAFVSSTSIRIHERTHTGEKPYECKQCGKAFSYLNSFRTHEMIHTGEKPFECKRCGKAFRSSSSFRLHERTHTGQKPYHCKECGKAYSCRASFQRHMLTHAEDGPPYKCMWESL

SEQ ID NO: 105 - protein, 357 aa, Homo Sapiens
MAPRRVRSFLRGLPALLLLLLFLGPWPAASHGGKYSREKNQPKPSPKRESGEEFRMEKLNQLWEKAQRLHLPPVRLAELHADLKIQERDELAWKKLKLDGLDEDGEKEARLIRNLNVILAKYGLDGKKDARQVTSNSLSGTQEDGLDDPRLEKLWHKAKTSGKFSGEELDKLWREFLHHKEKVHEYNVLLETLSRTEEIHENVISPSDLSDIKGSVLHSRHTELKEKLRSINQGLDRLRRVSHQGYSTEAEFEEPRVIDLWDLAQSANLTDKELEAFREELKHFEAKIEKHNHYQKQLEIAHEKLRHAESVGDGERVSRSREKHALLEGRTKELGYTVKKHLQDLSGRISRARHNEL

SEQ ID NO: 106 - protein, 647 aa, Homo Sapiens
MAEEEAPKKSRAAGGGASWELCAGALSARLAEEGSGDAGGRRRPPVDPRRLARQLLLLLWLLEAPLLLGVRAQAAGQGPGQGPGPGQQPPPPPQQQQSGQQYNGERGISVPDHGYCQPISIPLCTDIAYNQTIMPNLLGHTNQEDAGLEVHQFYPLVKVQCSAELKFFLCSMYAPVCTVLEQALPPCRSLCERARQGCEALMNKFGFQWPDTLKCEKFPVHGAGELCVGQNTSDKGTPTPSLLPEFWTSNPQHGGGGHRGGFPGGAGASERGKFSCPRALKVPSYLNYHFLGEKDCGAPCEPTKVYGLMYFGPEELRFSRTWIGIWSVLCCASTLFTVLTYLVDMRRFSYPERPIIFLSGCYTAVAVAYIAGFLLEDRVVCNDKFAEDGARTVAQGTKKEGCTILFMMLYFFSMASSIWWVILSLTWFLAAGMKWGHEAIEANSQYFHLAAWAVPAIKTITILALGQVDGDVLSGVCFVGLNNVDALRGFVLAPLFVYLFIGTSFLLAGFVSLFRIRTIMKHDGTKTEKLEKLMVRIGVFSVLYTVPATIVIACYFYEQAFRDQWERSWVAQSCKSYAIPCPHLQAGGGAPPHPPMSPDFTVFMIKYLMTLIVGITSGFWIWSGKTLNSWRKFYTRLTNSKQGETTV

SEQ ID NO: 107 - protein, 335 aa, Homo Sapiens
MAAGAAEAAVAAVEEVGSAGQFEELLRLKAKSLLVVHFWAPWAPQCAQMNEVMAELAKELPQVSFVKLEAEGVPEVSEKYEISSVPTFLFFKNSQKIDRLDGAHAPELTKKVQRHASSGSFLPSANEHLKEDLNLRLKKLTHAAPCMLFMKGTPQEPRCGFSKQMVEILHKHNIQFSSFDIFSDEEVRQGLKAYSSWPTYPQLYVSGELIGGLDIIKELEASEELDTICPKAPKLEERLKVLTNKASVMLFMKGNKQEAKCGFSKQILEILNSTGVEYETFDILEDEEVRQGLKAYSNWPTYPQLYVKGELVGGLDIVKELKENGELLPILRGEN

SEQ ID NO: 108 - protein, 277 aa, Homo Sapiens
MASAELDYTIEIPDQPCWSQKNSPSPGGKEAETRQPVVILLGWGGCKDKNLAKYSAIYHKRGCIVIRYTAPWHMVFFSESLGIPSLRVLAQKLLELLFDYEIEKEPLLFHVFSNGGVMLYRYVLELLQTRRFCRLRVVGTIFDSAPGDSNLVGALRALAAILERRAAMLRLLLLVAFALVVVLFHVLLAPITALFHTHFYDRLQDAGSRWPELYLYSRADEVVLARDIERMVEARLARRVLARSVDFVSSAHVSHLRDYPTYYTSLCVDFMRNCVRC

SEQ ID NO: 109 - protein, 265 aa, Homo Sapiens
MATLLRPVLRRLCGLPGLQRPAAEMPLRARSDGAGPLYSHHLPTSPLQKALLAAGSAAMALYNPYRHDMVAVLGETTGHRTLKVLRDQMRRDPEGAQILQERPRISTSTLDLGKLQSLPEGSLGREYLRFLDVNRVSPDTRAPTRFVDDEELAYVIQRYREVHDMLHTLLGMPTNILGEIVVKWFEAVQTGLPMCILGAFFGPIRLGAQSLQVLVSELIPWAVQNGRRAPCVLNLYYERRWEQSLRALREELGITAPPMHVQGLA

SEQ ID NO: 110 - protein, 406 aa, Homo Sapiens
MADPKYADLPGIARNEPDVYETSDLPEDDQAEFDAFAQELEELTSTSVEHIIVNPNAAYDKFKDKRVGTKGLDFSDRIGKTKRTGYESGEYEMLGEGLGVKETPQQKYQRLLHEVQELTTEVEKIKTTVKESATEEKLTPVLLAKQLAALKQQLVASHLEKLLGPDAAINLTDPDGALAKRLLLQLEATKNSKGGSGGKTTGTPPDSSLVTYELHSRPEQDKFSQAAKVAELEKRLTELETAVRCDQDAQNPLSAGLQGACLMETVELLQAKVSALDLAVLDQVEARLQSVLGKVNEIAKHKASVEDADTQSKVHQLYETIQRWSPIASTLPELVQRLVTIKQLHEQAMQFGQLLTHLDTTQQMIANSLKDNTTLLTQVQTTMRENLATVEGNFASIDERMKKLGK

SEQ ID NO: 111 - protein, 437 aa, Homo Sapiens
MAAATLRTPTQGTVTFEDVAVHFSWEEWGLLDEAQRCLYRDVMLENLALLTSLDVHHQKQHLGEKHFRSNVGRALFVKTCTFHVSGEPSTCREVGKDFLAKLGFLHQQAAHTGEQSNSKSDGGAISHRGKTHYNCGEHTKAFSGKHTLVQQQRTLTTERCYICSECGKSFSKSYSLNDHWRLHTGEKPYECRECGKSFRQSSSLIQHRRVHTAVRPHECDECGKLFSNKSNLIKHRRVHTGERPYECSECGKSFSQRSALLQHRGVHTGERPYECSECGKFFTYHSSLIKHQKVHSGSRPYECSECGKSFSQNSSLIEHHRVHTGERPYKCSECGKSFSQRSALLQHRGVHTGERPYECSECGKFFPYSSSLRKHQRVHTGSRPYECSECGKSFTQNSGLIKHRRVHTGEKPYECTECGKSFSHNSSLIKHQRIHSR

SEQ ID NO: 112 - protein, 4646 aa, Homo Sapiens [sequence omitted]

SEQ ID NO: 113 - protein, 136 aa, Homo Sapiens [sequence omitted]

SEQ ID NO: 114 - protein, 559 aa, Homo Sapiens
MPLVKRNIDPRHLCHTALPRGIKNELECVTNISLANIIRQLSSLSKYAEDIFGELFNEAHSFSFRVNSLQERVDRLSVSVTQLDPKEEELSLQDITMRKAFRSSTIQDQQLFDRKTLPIPLQETYDVCEQPPPLNILTPYRDDGKEGLKFYTNPSYFFDLWKEKMLQDTEDKRKEKRKQKQKNLDRPHEPEKVPRAPHDRRREWQKLAQGPELAEDDANLLHKHIEVANGPASHFETRPQTYVDHMDGSYSLSALPFSQMSELLTRAEERVLVRPHEPPPPPPMHGAGDAKPIPTCISSATGLIENRPQSPATGRTPVFVSPTPPPPPPPLPSALSTSSLRASMTSTPPPPVPPPPPPPATALQAPAVPPPPAPLQIAPGVLHPAPPPIAPPLVQPSPPVARAAPVCETVPVHPLPQGEVQGLPPPPPPPPLPPPGIRPSSPVTVTALAHPPSGLHPTPSTAPGPHVPLMPPSPPSQVIPASEPKRHPSTLPVISDARSVLLEAIRKGIQLRKVEEQREQEAKHERIENDVATILSRRIAVEYSDSEDDSEFDEVDWLE

SEQ ID NO: 115 - protein, 236 aa, Homo Sapiens
MAELDPFGAPAGAPGGPALGNGVAGAGEEDPAAAFLAQQESEIAGIENDEAFAILDGGAPGPQPHGEPPGGPDAVDGVMNGEYYQESNGPTDSYAAISQVDRLQSEPESIRKWREEQMERLEALDANSRKQEAEWKEKAIKELEEWYARQDEQLQKTKANNRVADEAFYKQPFADVIGYVAAEEAFVNDIDESSPGTEWERVARLCDFNPKSSKQAKDVSRMRSVLISLKQAPLVH

SEQ ID NO: 116 - protein, 146 aa, Homo Sapiens [sequence omitted]

SEQ ID NO: 117 - protein, 504 aa, Homo Sapiens
MEAPLQTEMVELVPNGKHSEGLLPVITPMAGNQRVEDPARSCMEGKSFLQKSPSKEPHFTDFEGKTSFGMSVFNLSNAIMGSGILGLAYAMANTGIILFLFLLTAVALLSSYSIHLLLKSSGVVGIRAYEQLGYRAFGTPGKLAAALAITLQNIGAMSSYLYIIKSELPLVIQTFLNLEEKTSDWYMNGNYLVILVSVTIILPLALMRQLGYLGYSSGFSLSCMVFFLIAVIYKKFHVPCPLPPNFNNTTGNFSHVEIVKEKVQLQVEPEASAFCTPSYFTLNSQTAYTIPIMAFAFVCHPEVLPIYTELKDPSKKKMQHISNLSIAVMYIMYFLAALFGYLTFYNGVESELLHTYSKVDPFDVLILCVRVAVLTAVTLTVPIVLFPVRRAIQQMLFPNQEFSWLRHVLIAVGLLTCINLLVIFAPNILGIFGVIGATSAPFLIFIFPAIFYFRIMPTEKEPARSTPKILALCFAMLGFLLMTMSLSFIIIDWASGTSRHGGNH

SEQ ID NO: 118 - protein, 193 aa, Homo Sapiens
MPVWGGGNKCGACGRTVYHAEEVQCDGRSFHRCCFLCMVCRKNLDSTTVAIHDEEIYCKSCYGKKYGPKGYGYGQGAGTLNMDRGERLGIKPESVQPHRPTTNPNTSKFAQKYGGAEKCSRCGDSVYAAEKIIGAGKPWHKNCFRCAKCGKSLESTTLTEKEGEIYCKGCYAKNFGPKGFGYGQGAGALVHAQ

SEQ ID NO: 119 - protein, 680 aa, Homo Sapiens
MINMGDSHVDTSSTVSEAVAEEVSLFSMTDMILFSLIVGLLTYWFLFRKKKEEVPEFTKIQTLTSSVRESSFVEKMKKTGRNIIVFYGSQTGTAEEFANRLSKDAHRYGMRGMSADPEEYDLADLSSLPEIDNALVVFCMATYGEGDPTDNAQDFYDWLQETDVDLSGVKFAVFGLGNKTYEHFNAMGKYVDKRLEQLGAQRIFELGLGDDDGNLEEDFITWREQFWPAVCEHFGVEATGEESSIRQYELVVHTDIDAAKVYMGEMGRLKSYENQKPPFDAKNPFLAAVTTNRKLNQGTERHLMHLELDISDSKIRYESGDHVAVYPANDSALVNQLGKILGADLDVVMSLNNLDEESNKKHPFPCPTSYRTALTYYLDITNPPRTNVLYELAQYASEPSEQELLRKMASSSGEGKELYLSWVVEARRHILAILQDCPSLRPPIDHLCELLPRLQARYYSIASSSKVHPNSVHICAVVVEYETKAGRINKGVATNWLRAKEPAGENGGRALVPMFVRKSQFRLPFKATTPVIMVGPGTGVAPFIGFIQERAWLRQQGKEVGETLLYYGCRRSDEDYLYREELAQFHRDGALTQLNVAFSREQSHKVYVQHLLKQDREHLWKLIEGGAHIYVCGDARNMARDVQNTFYDIVAELGAMEHAQAVDYIKKLMTKGRYSLDVWS

SEQ ID NO: 120 - protein, 835 aa, Homo Sapiens
MKRRTDPECTAPIKKQKKRVAELALSLSSTSDDEPPSSVSHGAKASTTSLSGSDSETEGKQHSSDSFDDAFKADSLVEGTSSRYSMYNSVSQKLMAKMGFREGEGLGKYSQGRKDIVEASSQKGRRGLGLTLRGFDQELNVDWRDEPEPSACEQVSWFPECTTEIPDTQEMSDWMVVGKRKMIIEDETEFCGEELLHSVLQCKSVFDVLDGEEMRRARTRANPYEMIRGVFFLNRAAMKMANMDFVFDRMFTNPRDSYGKPLVKDREAELLYFADVCAGPGGFSEYVLWRKKWHAKGFGMTLKGPNDFKLEDFYSASSELFEPYYGEGGIDGDGDITRPENISAFRNFVLDNTDRKGVHFLMADGGFSVEGQENLQEILSKQLLLCQFLMALSIVRTGGHFICKTFDLFTPFSVGLVYLLYCCFERVCLFKPITSRPANSERYVVCKGLKVGIDDVRDYLFAVNIKLNQLRNTDSDVNLVVPLEVIKGDHEFTDYMIRSNESHCSLQIKALAKIHAFVQDTTLSEPRQAEIRKECLRLWGIPDQARVAPSSSDPKSKFFELIQGTEIDIFSYKPTLLTSKTLEKIRPVFDYRCMVSGSEQKFLIGLGKSQIYTWDGRQSDRWIKLDLKTELPRDTLLSVEIVHELKGEGKAQRKISAIHILDVLVLNGTDVREQHFNQRIQLAEKFVKAVSKPSRPDMNPIRVKEVYRLEEMEKIFVRLEMKIIKGSSGTPKLSYTGRDDRHFVPMGLYIVRTVNEPWTMGFSKSFKKKFFYNKKTKDSTFDLPADSIAPFHICYYGRLFWEWGDGIRVHDSQKPQDQDKLSKEDVLSFIQMHRA

SEQ ID NO: 121 - protein, 1960 aa, Homo Sapiens
MAQQAADKYLYVDKNFINNPLAQADWAAKKLVWVPSDKSGFEPASLKEEVGEEAIVELVENGKKVKVNKDDIQKMNPPKFSKVEDMAELTCLNEASVLHNLKERYYSGLIYTYSGLFCVVINPYKNLPIYSEEIVEMYKGKKRHEMPPHIYAITDTAYRSMMQDREDQSILCTGESGAGKTENTKKVIQYLAYVASSHKSKKDQGELERQLLQANPILEAFGNAKTVKNDNSSRFGKFIRINFDVNGYIVGANIETYLLEKSRAIRQAKEERTFHIFYYLLSGAGEHLKTDLLLEPYNKYRFLSNGHVTIPGQQDKDMFQETMEAMRIMGIPEEEQMGLLRVISGVLQLGNIVFKKERNTDQASMPDNTAAQKVSHLLGINVTDFTRGILTPRIKVGRDYVQKAQTKEQADFAIEALAKATYERMFRWLVLRINKALDKTKRQGASFIGILDIAGFEIFDLNSFEQLCINYTNEKLQQLFNHTMFILEQEEYQREGIEWNFIDFGLDLQPCIDLIEKPAGPPGILALLDEECWFPKATDKSFVEKVMQEQGTHPKFQKPKQLKDKADFCIIHYAGKVDYKADEWLMKNMDPLNDNIATLLHQSSDKFVSELWKDVDRIIGLDQVAGMSETALPGAFKTRKGMFRTVGQLYKEQLAKLMATLRNTNPNFVRCIIPNHEKKAGKLDPHLVLDQLRCNGVLEGIRICRQGFPNRVVFQEFRQRYEILTPNSIPKGFMDGKQACVLMIKALELDSNLYRIGQSKVFFRAGVLAHLEEERDLKITDVIIGFQACCRGYLARKAFAKRQQQLTAMKVLQRNCAAYLKLRNWQWWRLFTKVKPLLQVSRQEEEMMAKEEELVKVREKQLAAENRLTEMETLQSQLMAEKLQLQEQLQAETELCAEAEELRARLTAKKQELEEICHDLEARVEEEEERCQHLQAEKKKMQQNIQELEEQLEEEESARQKLQLEKVTTEAKLKKLEEEQIILEDQNCKLAKEKKLLEDRIAEFTTNLTEEEEKSKSLAKLKNKHEAMITDLEERLRREEKQRQELEKTRRKLEGDSTDLSDQIAELQAQIAELKMQLAKKEEELQAALARVEEEAAQKNMALKKIRELESQISELQEDLESERASRNKAEKQKRDLGEELEALKTELEDTLDSTAAQQELRSKREQEVNILKKTLEEEAKTHEAQIQEMRQKHSQAVEELAEQLEQTKRVKANLEKAKQTLENERGELANEVKVLLQGKGDSEHKRKKVEAQLQELQVKFNEGERVRTELADKVTKLQVELDNVTGLLSQSDSKSSKLTKDFSALESQLQDTQELLQEENRQKLSLSTKLKQVEDEKNSFREQLEEEEEAKHNLEKQIATLHAQVADMKKKMEDSVGCLETAEEVKRKLQKDLEGLSQRHEEKVAAYDKLEKTKTRLQQELDDLLVDLDHQRQSACNLEKKQKKFDQLLAEEKTISAKYAEERDRAEAEAREKETKALSLARALEEAMEQKAELERLNKQFRTEMEDLMSSKDDVGKSVHELEKSKRALEQQVEEMKTQLEELEDELQATEDAKLRLEVNLQAMKAQFERDLQGRDEQSEEKKKQLVRQVREMEAELEDERKQRSMAVAARKKLEMDLKDLEAHIDSANKNRDEAIKQLRKLQAQMKDCMRELDDTRASREEILAQAKENEKKLKSMEAEMIQLQEELAAAERAKRQAQQERDELADEIANSSGKGALALEEKRRLEARIAQLEEELEEEQGNTELINDRLKKANLQIDQINTDLNLERSHAQKNENARQQLERQNKELKVKLQEMEGTVKSKYKASITALEAKIAQLEEQLDNETKERQAACKQVRRTEKKLKDVLLQVDDERRNAEQYKDQADKASTRLKQLKRQLEEAEEEAQRANASRRKLQRELEDATETADAMNREVSSLKNKLRRGDLPFVVPRRMARKGAGDGSDEEVDGKADGAEAKPAE

SEQ ID NO: 122 - protein, 110 aa, Homo Sapiens [sequence omitted]

SEQ ID NO: 123 - protein, 334 aa, Homo Sapiens
MATLKEKLIAPVAEEEATVPNNKITVVGVGQVGMACAISILGKSLADELALVDVLEDKLKGEMMDLQHGSLFLQTPKIVADKDYSVTANSKIVVVTAGVRQQEGESRLNLVQRNVNVFKFIIPQIVKYSPDCIIIVVSNPVDILTYVTWKLSGLPKHRVIGSGCNLDSARFRYLMAEKLGIHPSSCHGWILGEHGDSSVAVWSGVNVAGVSLQELNPEMGTDNDSENWKEVHKMVVESAYEVIKLKGYTNWAIGLSVADLIESMLKNLSRIHPVSTMVKGMYGIENEVFLSLPCILNARGLTSVINQKLKDDEVAQLKKSADTLWDIQKDLKDL

SEQ ID NO: 124 - protein, 128 aa, Homo Sapiens
MESKEERALNNLIVENVNQENDEKDEKEQVANKGEPLALPLNVSEYCVPRGNRRRFRVRQPILQYRWDIMHRLGEPQARMREENMERIGEEVRQLMEKLREKQLSHSLRAVSTDPPHHDHHDEFCLMP

SEQ ID NO: 125 - protein, 379 aa, Homo Sapiens
MGCLGNSKTEDQRNEEKAQREANKKIEKQLQKDKQVYRATHRLLLLGAGESGKSTIVKQMRILHVNGFNGDEKATKVQDIKNNLKEAIETIVAAMSNLVPPVELANPENQFRVDYILSVMNVPDFDFPPEFYEHAKALWEDEGVRACYERSNEYQLIDCAQYFLDKIDVIKQADYVPSDQDLLRCRVLTSGIFETKFQVDKVNFHMFDVGGQRDERRKWIQCFNDVTAIIFVVASSSYNMVIREDNQTNRLQEALNLFKSIWNNRWLRTISVILFLNKQDLLAEKVLAGKSKIEDYFPEFARYTTPEDATPEPGEDPRVTRAKYFIRDEFLRISTASGDGRHYCYPHFTCAVDTENIRRVFNDCRDIIQRMHLRQYELL

SEQ ID NO: 126 - protein, 522 aa, Homo Sapiens
MEFPDHSRHLLQCLSEQRHQGFLCDCTVLVGDAQFRAHRAVLASCSMYFHLFYKDQLDKRDIVHLNSDIVTAPAFALLLEFMYEGKLQFKDLPIEDVLAAASYLHMYDIVKVCKKKLKEKATTEADSTKKEEDASSCSDKVESLSDGSSHIAGDLPSDEDEGEDEKLNILPSKRDLAAEPGNMWMRLPSDSAGIPQAGGEAEPHATAAGKTVASPCSSTESLSQRSVTSVRDSADVDCVLDLSVKSSLSGVENLNSSYFSSQDVLRSNLVQVKVEKEASCDESDVGTNDYDMEHSTVKESVSTNNRVQYEPAHLAPLREDSVLRELDREDKASDDEMMTPESERVQVEGGMESSLLPYVSNILSPAGQIFMCPLCNKVFPSPHILQIHLSTHFREQDGIRSKPAADVNVPTCSLCGKTFSCMYTLKRHERTHSGEKPYTCTQCGKSFQYSHNLSRHAVVHTREKPHACKWCERRFTQSGDLYRHIRKFHCELVNSLSVKSEALSLPTVRDWTLEDSSQELWK

SEQ ID NO: 127 - protein, 353 aa, Homo Sapiens
MNGDQNSDVYAQEKQDFVQHFSQIVRVLTEDEMGHPEIGDAIARLKEVLEYNAIGGKYNRGLTVVVAFRELVEPRKQDADSLQRAWTVGWCVELLQAFFLVADDIMDSSLTRRGQICWYQKPGVGLDAINDANLLEACIYRLLKLYCREQPYYLNLIELFLQSSYQTEIGQTLDLLTAPQGNVDLVRFTEKRYKSIVKYKTAFYSFYLPIAAAMYMAGIDGEKEHANAKKILLEMGEFFQIQDDYLDLFGDPSVTGKIGTDIQDNKCSWLVVQCLQRATPEQYQILKENYGQKEAEKVARVKALYEELDLPAVFLQYEEDSYSHIMALIEQYAAPLPPAVFLGLARKIYKRRK

SEQ ID NO: 128 - protein, 335 aa, Homo Sapiens
MAVDITLLFRASVKTVKTRNKALGVAVGGGVDGSRDELFRRSPRPKGDFSSRAREVISHIGKLRDFLLEHRKDYINAYSHTMSEYGRMTDTERDQIDQDAQIFMRTCSEAIQQLRTEAHKEIHSQQVKEHRTAVLDFIEDYLKRVCKLYSEQRAIRVKRVVDKKRLSKLEPEPNTKTRESTSSEKVSQSPSKDSEENPATEERPEKILAETQPELGTWGDGKGEDELSPEEIQMFEQENQRLIGEMNSLFDEVRQIEGRVVEISRLQEIFTEKVLQQEAEIDSIHQLVVGATENIKEGNEDIREAIKNNAGFRVWILFFLVMCSFSLLFLDWYDS

SEQ ID NO: 129 - protein, 447 aa, Homo Sapiens [sequence omitted]

SEQ ID NO: 130 - protein, 377 aa, Homo Sapiens
MEALLLGAGLLLGAYVLVYYNLVKAPPCGGMGNLRGRTAVVTGANSGIGKMTALELARRGARVVLACRSQERGEAAAFDLRQESGNNEVIFMALDLASLASVRAFATAFLSSEPRLDILIHNAGISSCGRTREAFNLLLRVNHIGPFLLTHLLLPCLKACAPSRVVVVASAAHCRGRLDFKRLDRPVVGWRQELRAYADTKLANVLFARELANQLEATGVTCYAAHPGPVNSELFLRHVPGWLRPLLRPLAWLVLRAPRGGAQTPLYCALQEGIEPLSGRYFANCHVEEVPPAARDDRAAHRLWEASKRLAGLGPGEDAEPDEDPQSEDSEAPSSLSTPHPEEPTVSQPYPSPQSSPDLSKMTHRIQAKVEPEIQLS

SEQ ID NO: 131 - protein, 100 aa, Homo Sapiens
MPKRKVSSAEGAAKEEPKRRSARLSAKPPAKVEAKPKKAAAKDKSSDKKVQTKGKRGAKGKQAEVANQETKEDLPAENGETKTEESPASDEAGEKEAKSD

SEQ ID NO: 132 - protein, 475 aa, Homo Sapiens
MESKALLVLTLAVWLQSLTASRGGVAAADQRRDFIDIESKFALRTPEDTAEDTCHLIPGVAESVATCHFNHSSKTFMVIHGWTVTGMYESWVPKLVAALYKREPDSNVIVVDWLSRAQEHYPVSAGYTKLVGQDVARFINWMEEEFNYPLDNVHLLGYSLGAHAAGIAGSLTNKKVNRITGLDPAGPNFEYAEAPSRLSPDDADFVDVLHTFTRGSPGRSIGIQKPVGHVDIYPNGGTFQPGCNIGEAIRVIAERGLGDVDQLVKCSHERSIHLFIDSLLNEENPSKAYRCSSKEAFEKGLCLSCRKNRCNNLGYEINKVRAKRSSKMYLKTRSQMPYKVFHYQVKIHFSGTESETHTNQAFEISLYGTVAESENIPFTLPEVSTNKTYSFLIYTEVDIGELLMLKLKWKSDSYFSWSDWWSSPGFAIQKIRVKAGETQKKVIFCSREKVSHLQKGKAPAVFVKCHDKSLNKKSG

SEQ ID NO: 133 - protein, 176 aa, Homo Sapiens
MAARGRRAEPQGREAPGPAGGGGGGSRWAESGSGTSPESGDEEVSGAGSSPVSGGVNLFANDGSFLELFKRKMEEEQRQRQEEPPPGPQRPDQSAAAAGPGDPKRKGGPGSTLSFVGKRRGGNKLALKTGIVAKKQKTEDEVLTSKGDAWAKYMAEVKKYKAHQCGDDDKTRPLVK

SEQ ID NO: 134 - protein, 445 aa, Homo Sapiens
MREIVHLQAGQCGNQIGAKFWEVISDEHGIDPTGTYHGDSDLQLERINVYYNEATGGKYVPRAVLVDLEPGTMDSVRSGPFGQIFRPDNFVFGQSGAGNNWAKGHYTEGAELVDSVLDVVRKEAESCDCLQGFQLTHSLGGGTGSGMGTLLISKIREEYPDRIMNTFSVVPSPKVSDTVVEPYNATLSVHQLVENTDETYCIDNEALYDICFRTLKLTTPTYGDLNHLVSATMSGVTTCLRFPGQLNADLRKLAVNMVPFPRLHFFMPGFAPLTSRGSQQYRALTVPELTQQMFDAKNMMAACDPRHGRYLTVAAVFRGRMSMKEVDEQMLNVQNKNSSYFVEWIPNNVKTAVCDIPPRGLKMSATFIGNSTAIQELFKRISEQFTAMFRRKAFLHWYTGEGMDEMEFTEAESNMNDLVSEYQQYQDATAEEEGEFEEEAEEEVA

SEQ ID NO: 135 - protein, 1004 aa, Homo Sapiens
MWEKMETKTIVYDLDTSGGLMEQIQALLAPPKTDEAEKRSRKPEKEPRRSGRATNHDSCDSCKEGGDLLCCDHCPAAFHLQCCNPPLSEEMLPPGEWMCHRCTVRRKKREQKKELGHVNGLVDKSGKRTTSPSSDTDLLDRSASKTELKAIAHARILERRASRPGTPTSSASTETPTSEQNDVDEDIIDVDEEPVAAEPDYVQPQLRRPFELLIAAAMERNPTQFQLPNELTCTTALPGSSKRRRKEETTGKNVKKTQHELDHNGLVPLPVKVCFTCNRSCRVAPLIQCDYCPLLFHMDCLEPPLTAMPLGRWMCPNHIEHVVLNQKNMTLSNRCQVFDRFQDTVSQHVVKVDFLNRIHKKHPPNRRVLQSVKRRSLKVPDAIKSQYQFPPPLIAPAAIRDGELICNGIPEESQMHLLNSEHLATQAEQQEWLCSVVALQCSILKHLSAKQMPSHWDSEQTEKADIKPVIVTDSSVTTSLQTADKTPTPSHYPLSCPSGISTQNSLSCSPPHQSPALEDIGCSSCAEKSKKTPCGTANGPVNTEVKANGPHLYSSPTDSTDPRRLPGANTPLPGLSHRQGWPRPLTPPAAGGLQNHTVGIIVKTENATGPSSCPQRSLVPVPSLPPSIPSSCASIENTSTLQRKTVQSQIGPPLTDSRPLGSPPNATRVLTPPQAAGDGILATTANQRFSSPAPSSDGKVSPGTLSIGSALTVPSFPANSTAMVDLTNSLRAFMDVNGEIEINMLDEKLIKFLALQRIHQLFPSRVQPSPGSVGTHQLASGGHHIEVQRKEVQARAVFYPLLGLGGAVNMCYRTLYIGTGADMDVCLTNYGHCNYVSGKHACIFYDENTKHYELLNYSEHGTTVDNVLYSCDFSEKTPPTPPSSIVAKVQSVIRRRRHQKQDEEPSEEAAMMSSQAQGPQRRPCNCKASSSSLIGGSGAGWEGTALLHHGSYIKLGCLQFVFSITEFATKQPKGDASLLQDGVLAEKLSLKPHQGPVLRSNSVP

SEQ ID NO: 136 - protein, 784 aa, Homo Sapiens
MDADDSRAPKGSLRKFLEHLSGAGKAIGVLTSGGDAQGMNAAVRAVVRMGIYVGAKVYFIYEGYQGMVDGGSNIAEADWESVSSILQVGGTIIGSARCQAFRTREGRLKAACNLLQRGITNLCVIGGDGSLTGANLFRKEWSGLLEELARNGQIDKEAVQKYAYLNVVGMVGSIDNDFCGTDMTIGTDSALHRIIEVVDAIMTTAQSHQRTFVLEVMGRHCGYLALVSALACGADWVFLPESPPEEGWEEQMCVKLSENRARKKRLNIIIVAEGAIDTQNKPITSEKIKELVVTQLGYDTRVTILGHVQRGGTPSAFDRILASRMGVEAVIALLEATPDTPACVVSLNGNHAVRLPLMECVQMTQDVQKAMDERRFQDAVRLRGRSFAGNLNTYKRLAIKLPDDQIPKTNCNVAVINVGAPAAGMNAAVRSAVRVGIADGHRMLAIYDGFDGFAKGQIKEIGWTDVGGWTGQGGSILGTKRVLPGKYLEEIATQMRTHSINALLIIGGFEAYLGLLELSAAREKHEEFCVPMVMVPATVSNNVPGSDFSIGADTALNTITDTCDRIKQSASGTKRRVFIIETMGGYCGYLANMGGLAAGADAAYIFEEPFDIRDLQSNVEHLTEKMKTTIQRGLVLRNESCSENYTTDFIYQLYSEEGKGVFDCRKNVLGHMQQGGAPSPFDRNFGTKISARAMEWITAKLKEARGRGKKFTTDDSICVLGISKRNVIFQPVAELKKQTDFEHRIPKEQWWLKLRPLMKILAKYKASYDVSDSGQLEHVQPWSV

SEQ ID NO: 137 - protein, 249 aa, Homo Sapiens
MASRRMETKPVITCLKTLLIIYSFVFWITGVILLAVGVWGKLTLGTYISLIAENSTNAPYVLIGTGTTIVVFGLFGCFATCRGSPWMLKLYAMFLSLVFLAELVAGISGFVFRHEIKDTFLRTYTDAMQTYNGNDERSRAVDHVQRSLSCCGVQNYTNWSTSPYFLEHGIPPSCCMNETDCNPQDLHNLTVAATKVNQKGCYDLVTSFMETNMGIIAGVAFGIAFSQLIGMLLACCLSRFITANQYEMV

SEQ ID NO: 138 - protein, 710 aa, Homo Sapiens
MSVPSSLSQSAINANSHGGPALSLPLPLHAAHNQLLNAKLQATAVGPKDLRSAMGEGGGPEPGPANAKWLKEGQNQLRRAATAHRDQNRNVTLTLAEEASQEPEMAPLGPKGLIHLYSELELSAHNAANRGLRGPGLIISTQEQGPDEGEEKAAGEAEEEEEDDDDEEEEEDLSSPPGLPEPLESVEAPPRPQALTDGPREHSKSASLLFGMRNSAASDEDSSWATLSQGSPSYGSPEDTDSFWNPNAFETDSDLPAGWMRVQDTSGTYYWHIPTGTTQWEPPGRASPSQGSSPQEESQLTWTGFAHGEGFEDGEFWKDEPSDEAPMELGLKEPEEGTLTFPAQSLSPEPLPQEEEKLPPRNTNPGIKCFAVRSLGWVEMTEEELAPGRSSVAVNNCIRQLSYHKNNLHDPMSGGWGEGKDLLLQLEDETLKLVEPQSQALLHAQPIISIRVWGVGRDSGRERDFAYVARDKLTQMLKCHVFRCEAPAKNIATSLHEICSKIMAERRNARCLVNGLSLDHSKLVDVPFQVEFPAPKNELVQKFQVYYLGNVPVAKPVGVDVINGALESVLSSSSREQWTPSHVSVAPATLTILHQQTEAVLGECRVRFLSFLAVGRDVHTFAFIMAAGPASFCCHMFWCEPNAASLSEAVQAACMLRYQKCLDARSQASTSCLPAPPAESVARRVGWTVRRGVQSLWGSLKPKRLGAHTP

SEQ ID NO: 139 - protein, 260 aa, Homo Sapiens
MAGSPLLWGPRAGGVGLLVLLLLGLFRPPPALCARPVKEPRGLSAASPPLAETGAPRRFRRSVPRGEAAGAVQELARALAHLLEAERQERARAEAQEAEDQQARVLAQLLRVWGAPRNSDPALGLDDDPDAPAAQLARALLRARLDPAALAAQLVPAPVPAAALRPRPPVYDDGPAGPDAEEAGDETPDVDPELLRYLLGRILAGSADSEGVAAPRRLRRAADHDVGSELPPEGVLGALLRVKRLETPAPQVPARRLLPP

SEQ ID NO: 140 - protein, 963 aa, Homo Sapiens
MADLAECNIKVMCRFRPLNESEVNRGDKYIAKFQGEDTVVIASKPYAFDRVFQSSTSQEQVYNDCAKKIVKDVLEGYNGTIFAYGQTSSGKTHTMEGKLHDPEGMGIIPRIVQDIFNYIYSMDENLEFHIKVSYFEIYLDKIRDLLDVSKTNLSVHEDKNRVPYVKGCTERFVCSPDEVMDTIDEGKSNRHVAVTNMNEHSSRSHSIFLINVKQENTQTEQKLSGKLYLVDLAGSEKVSKTGAEGAVLDEAKNINKSLSALGNVISALAEGSTYVPYRDSKMTRILQDSLGGNCRTTIVICCSPSSYNESETKSTLLFGQRAKTIKNTVCVNVELTAEQWKKKYEKEKEKNKILRNTIQWLENELNRWRNGETVPIDEQFDKEKANLEAFTVDKDITLTNDKPATAIGVIGNFTDAERRKCEEEIAKLYKQLDDKDEEINQQSQLVEKLKTQMLDQEELLASTRRDQDNMQAELNRLQAENDASKEEVKEVLQALEELAVNYDQKSQEVEDKTKEYELLSDELNQKSATLASIDAELQKLKEMTNHQKKRAAEMMASLLKDLAEIGIAVGNNDVKQPEGTGMIDEEFTVARLYISKMKSEVKTMVKRCKQLESTQTESNKKMEENEKELAACQLRISQHEAKIKSLTEYLQNVEQKKRQLEESVDALSEELVQLRAQEKVHEMEKEHLNKVQTANEVKQAVEQQIQSHRETHQKQISSLRDEVEAKAKLITDLQDQNQKMMLEQERLRVEHEKLKATDQEKSRKLHELTVMQDRREQARQDLKGLEETVAKELQTLHNLRKLFVQDLATRVKKSAEIDSDDTGGSAAQKQKISFLENNLEQLTKVHKQLVRDNADLRCELPKLEKRLRATAERVKALESALKEAKENASRDRKRYQQEVDRIKEAVRSKNMARRGHSAQIAKPIRPGQHPAASPTHPSAIRGGGAFVQNSQPVAVRGGGGKQV

SEQ ID NO: 141 - protein, 142 aa, Homo Sapiens
MATKIDKEACRAAYNLVRDDGSAVIWVTFKYDGSTIVPGEQGAEYQHFIQQCTDDVRLFAFVRFTTGDAMSKRSKFALITWIGENVSGLQRAKTGTDKTLVKEVVQNFAKEFVISDRKELEEDFIKSELKKAGGANYDAQTE

SEQ ID NO: 142 - protein, 374 aa, Homo Sapiens
MSRVPSPPPPAEMSSGPVAESWCYTQIKVVKFSYMWTINNFSFCREEMGEVIKSSTFSSGANDKLKWCLRVNPKGLDEESKDYLSLYLLLVSCPKSEVRAKFKFSILNAKGEETKAMESQRAYRFVQGKDWGFKKFIRRDFLLDEANGLLPDDKLTLFCEVSVVQDSVNISGQNTMNMVKVPECRLADELGGLWENSRFTDCCLCVAGQEFQAHKAILAARSPVFSAMFEHEMEESKKNRVEINDVEPEVFKEMMCFIYTGKAPNLDKMADDLLAAADKYALERLKVMCEDALCSNLSVENAAEILILADLHSADQLKTQAVDFINYHASDVLETSGWKSMVVSHPHLVAEAYRSLASAQCPFLGPPRKRLKQS

SEQ ID NO: 143 - protein, 281 aa, Homo Sapiens
MKLAAMIKKMCPSDSELSIPAKNCYRMVILGSSKVGKTAIVSRFLTGRFEDAYTPTIEDFHRKFYSIRGEVYQLDILDTSGNHPFPAMRRLSILTGDVFILVFSLDNRDSFEEVQRLRQQILDTKSCLKNKTKENVDVPLVICGNKGDRDFYREVDQREIEQLVGDDPQRCAYFEISAKKNSSLDQMFRALFAMAKLPSEMSPDLHRKVSVQYCDVLHKKALRNKKLLRAGSGGGGGDPGDAFGIVAPFARRPSVHSDLMYIREKASAGSQAKDKERCVIS

SEQ ID NO: 144 - protein, 855 aa, Homo Sapiens
MAVEDSTLQVVVRVRPPTPRELDSQRRPVVQVVDERVLVFNPEEPDGGFPGLKWGGTHDGPKKKGKDLTFVFDRVFGEAATQQDVFQHTTHSVLDSFLQGYNCSVFAYGATGAGKTHTMLGREGDPGIMYLTTVELYRRLEARQQEKHFEVLISYQEVYNEQIHDLLEPKGPLAIREDPDKGVVVQGLSFHQPASAEQLLEILTRGNRNRTQHPTDANATSSRSHAIFQIFVKQQDRVPGLTQAVQVAKMSLIDLAGSERASSTHAKGERLREGANINRSLLALINVLNALADAKGRKTHVPYRDSKLTRLLKDSLGGNCRTVMIAAISPSSLTYEDTYNTLKYADRAKEIRLSLKSNVTSLDCHISQYATICQQLQAEVAALRKKLQVYEGGGQPPPQDLPGSPKSGPPPEHLPSSPLPPHPPSQPCTPELPAGPRALQEESLGMEAQVERAMEGNSSDQEQSPEDEDEGPAEEVPTQMPEQNPTHALPESPRLTLQPKPVVGHFSARELDGDRSKQLALKVLCVAQRQYSLLQAANLLTPDMITEFETLQQLVQEEKIEPGAEALRTSGLARGAPLAQELCSESKPPGYTGPVTRTMARRLSGPLHTLGIPPGPNCTPAQGSRWPMEKKRRRPSALEADSPMAPKRGTKRQRQSFLPCLRRGSLPDTQPSQGPSTPKGERASSPCHSPRVCPATVIKSRVPLGPSAMQNCSTPLALPTRDLNATFDLSEEPPSKPSFHECIGWDKIPQELSRLDQPFIPRAPVPLFTMKGPKPTSSLPGTSACKKKRVASSSVSHGRSRIARLPSSTLKRPAGPLVLPELPLSPLCPSNRRNGKDLIRVGRALSAGNGVTKVS

SEQ ID NO: 145 - protein, 971 aa, Homo Sapiens
MLRRPAPALAPAARLLLAGLLCGGGVWAARVNKHKPWLEPTYHGIVTENDNTVLLDPPLIALDKDAPLRFAGEICGFKIHGQNVPFDAVVVDKSTGEGVIRSKEKLDCELQKDYSFTIQAYDCGKGPDGTNVKKSHKATVHIQVNDVNEYAPVFKEKSYKATVIEGKQYDSILRVEAVDADCSPQFSQICSYEIITPDVPFTVDKDGYIKNTEKLNYGKEHQYKLTVTAYDCGKKRATEDVLVKISIKPTCTPGWQGWNNRIEYEPGTGALAVFPNIHLETCDEPVASVQATVELETSHIGKGCDRDTYSEKSLHRLCGAAAGTAELLPSPSGSLNWTMGLPTDNGHDSDQVFEFNGTQAVRIPDGVVSVSPKEPFTISVWMRHGPFGRKKETILCSSDKTDMNRHHYSLYVHGCRLIFLFRQDPSEEKKYRPAEFHWKLNQVCDEEWHHYVLNVEFPSVTLYVDGTSHEPFSVTEDYPLHPSKIETQLVVGACWQEFSGVENDNETEPVTVASAGGDLHMTQFFRGNLAGLTLRSGKLADKKVIDCLYTCKEGLDLQVLEDSGRGVQIQAHPSQLVLTLEGEDLGELDKAMQHISYLNSRQFPTPGIRRLKITSTIKCFNEATCISVPPVDGYVMVLQPEEPKISLSGVHHFARAASEFESSEGVFLFPELRIISTITREVEPEGDGAEDPTVQESLVSEEIVHDLDTCEVTVEGEELNHEQESLEVDMARLQQKGIEVSSSELGMTFTGVDTMASYEEVLHLLRYRNWHARSLLDRKFKLICSELNGRYISNEFKVEVNVIHTANPMEHANHMAAQPQFVHPEHRSFVDLSGHNLANPHPFAVVPSTATVVIVVCVSFLVFMIILGVFRIRAAHRRTMRDQDTGKENEMDWDDSALTITVNPMETYEDQHSSEEEEEEEEEEESEDGEEEDDITSAESESSEEEEGEQGDPQNATRQQQLEWDDSTLSY

SEQ ID NO: 146 - protein, 167 aa, Homo Sapiens
MAASVCSGLLGPRVLSWSRELPCAWRALHTSPVCAKNRAARVRVSKGDKPVTYEEAHAPHYIAHRKGWLSLHTGNLDGEDHAAERTVEDVFLRKFMWGTFPGCLADQLVLKRRGNQLEICAVVLRQLSPHKYYFLVGYSETLLSYFYKCPVRLHLQTVPSKVVYKYL

SEQ ID NO: 147 - protein, 249 aa, Homo Sapiens
MAAGMYLEHYLDSIENLPFELQRNFQLMRDLDQRTEDLKAEIDKLATEYMSSARSLSSEEKLALLKQIQEAYGKCKEFGDDKVQLAMQTYEMVDKHIRRLDTDLARFEADLKEKQIESSDYDSSSSKGKKKGRTQKEKKAARARSKGKNSDEEAPKTAQKKLKLVRTSPEYGMPSVTFGSVHPSDVLDMPVDPNEPTYCLCHQVSYGEMIGCDNPDCSIEWFHFACVGLTTKPRGKWFCPRCSQERKKK

SEQ ID NO: 148 - protein, 459 aa, Homo Sapiens
MASSASLETMVPPACPRAGASPATSKTLAFSIERIMAKTSEPRAPFEPRPGALEADGSQGKKLLNLCSPLPCMIPLQPLGYEVPSKTLLSYSELWKSSLRAGGGGGGGGGGGGGGGGAPVCGASGLCKTNCGVCCKAELGLAPSALPAGRVIKPQVINQAVGLPASGSLYYFNYLDSTAYPPSELLSGHLFPSGLLNAQAPAALAAHPKLFLLENAKLAGLAADKFPHPAPYPHKERLPAPLEQVLKENSALTAERGGVKGHSKLPGGSADGKPKNFTCEVCGKVFNAHYNLTRHMPVHTGARPFVCKVCGKGFRQASTLCRHKIIHTQEKPHKCNQCGKAFNRSSTLNTHIRIHAGYKPFVCEFCGKGFHQKGNYKNHKLTHSGEKQYKCTICNKAFHQVYNLTFHMHTHNDKKPFTCATCGKGFCRNFDLKKHVRKLHDSVGPAAPSAKDLTRTVQS

SEQ ID NO: 149 - protein, 84 aa, Homo Sapiens
MKVKIKCWNGVATWLWVANDENCGICRMAFNGCCPDCKVPGDDCPLVWGQCSHCFHMHCILKWLHAQQVQQHCPMCRQEWKFKE

SEQ ID NO: 150 - protein, 451 aa, Homo Sapiens [sequence omitted]

SEQ ID NO: 151 - protein, 254 aa, Homo Sapiens
MAAYKLVLIRHGESAWNLENRFSGWYDADLSPAGHEEAKRGGQALRDAGYEFDICFTSVQKRAIRTLWTVLDAIDQMWLPVVRTWRLNERHYGGLTGLNKAETAAKHGEAQVKIWRRSYDVPPPPMEPDHPFYSNISKDRRYADLTEDQLPSCESLKDTIARALPFWNEEIVPQIKEGKRVLIAAHGNSLRGIVKHLEGLSEEAIMELNLPTGIPIVYELDKNLKPIKPMQFLGDEETVRKAMEAVAAQGKAKK

SEQ ID NO: 152 - protein, 269 aa, Homo Sapiens
AILSGDKSENVQDLLLLDVTPLSLGIETAGGVMTVLIKRNTTIPTKQTQTFTTYSDNQPGVLIQVYEGERAMTKDNNLLGKFELTGIPPAPRGVPQIEVTFDIDANGILNVSAVDKSTGKENKITITNDKGRLSKEDIERMVQEAEKYKAEDEKQRDKVSSKNSLESYAFNMKATVEDEKLQGKINDEDKQKILDKCNEIINWLDKNQTAEKEEFEHQQKELEKVCNPIITKLYQSAGGMPGGMPGGFPGGGAPPSGGASSGPTIEEVD

SEQ ID NO: 153 - protein, 208 aa, Homo Sapiens
MASSLLAGERLVRALGPGGELEPERLPRKLRAELEAALGKKHKGGDSSSGPQRLVSFRLIRDLHQHLRERDSKLYLHELLEGSEIYLPEVVKPPRNPELVARLEKIKIQLANEEYKRITRNVTCQDTRHGGTLSDLGKQVRSLKALVITIFNFIVTVVAAFVCTYLGSQYIFTEMASRVLAALIVASVVGLAELYVMVRAMEGELGEL

SEQ ID NO: 154 - protein, 386 aa, Homo Sapiens
MFPEPPTPGPPSPDTPPDSSRISHGPVPPWALATIVLVSGLLIFSCCFCLYRKSCRRRTGKKSQAQAQVHLQEVKGLGQSYIDKVQPEVEELEPAPSGPGQQVADKHELGRLQYSLDYDFQSGQLLVGILQAMGLAALDLGGSSDPYVRVYLLPDKRRRYETKVHRQTLNPHFGETFAFKVPYVELGGRVLVMAVYDFDRFSRNDAIGEVRVPMSSVDLGRPVQAWRELQAAPREEQEKLGDICFSLRYVPTAGKLTVIVLEAKNLKKMDVGGLSDPYVKVHLLQGGKKVRKKKTTIKKNTLNPYYNEAFSFEVPCDQVQKVQVELTVLDYDKLGKNEAIGRVAVGAAAGGAGLRHWADMLANPRRPIAQWHSLRPPDRVRLLPAP

SEQ ID NO: 155 - protein, 160 aa, Homo Sapiens [sequence omitted]

SEQ ID NO: 156 - protein, 248 aa, Homo Sapiens
MEGVEEKKKEVPAVPETLKKKRRNFAELKIKRLRKKFAQKMLRKARRKLIYEKAKHYHKEYRQMYRTEIRMARMARKAGNFYVPAEPKLAFVIRIRGINGVSPKVRKVLQLLRLRQIFNGTFVKLNKASINMLRIVEPYIAWGYPNLKSVNELIYKRGYGKINKKRIALTDNALIARSLGKYGIICMEDLIHEIYTVGKRFKEANNFLWPFKLSSPRGGMKKKTTHFVEGGDAGNREDQINRLIRRMN

SEQ ID NO: 157 - protein, 219 aa, Homo Sapiens
MNRLFGKAKPKAPPPSLTDCIGTVDSRAESIDKKISRLDAELVKYKDQIKKMREGPAKNMVKQKALRVLKQKRMYEQQRDNLAQQSFNMEQANYTIQSLKDTKTTVDAMKLGVKEMKKAYKQVKIDQIEDLQDQLEDMMEDANEIQEALSRSYGTPELDEDDLEAELDALGDELLADEDSSYLDEAASAPAIPEGVPTDTKNKDGVLVDEFGLPQIPAS

SEQ ID NO: 158 - protein, 149 aa, Homo Sapiens
MASSDIQVKELEKRASGQAFELILSPRSKESVPEFPLSPPKKKDLSLEEIQKKLEAAEERRKSHEAEVLKQLAEKREHEKEVLQKAIEENNNFSKMAEEKLTHKMEANKENREAQMAAKLERLREKDKHIEEVRKNKESKDPADETEAD

SEQ ID NO: 159 - protein, 297 aa, Homo Sapiens [sequence omitted]

SEQ ID NO: 160 - protein, 324 aa, Homo Sapiens
MSSEAETQQPPAAPPAAPALSAADTKPGTTGSGAGSGGPGGLTSAAPAGGDKKVIATKVLGTVKWFNVRNGYGFINRNDTKEDVFVHQTAIKKNNPRKYLRSVGDGETVEFDVVEGEKGAEAANVTGPGGVPVQGSKYAADRNHYRRYPRRRGPPRNYQQNYQNSESGEKNEGSESAPEGQAQQRRPYRRRRFPPYYMRRPYGRRPQYSNPPVQGEVMEGADNQGAGEQGRPVRQNMYRGYRPRFRRGPPRQRQPREDGNEEDKENQGDETQGQQPPQRRYRRNFNYRRRRPENPKPQDGKETKAADPPAENSSAPEAEQGGAE

SEQ ID NO: 161 - protein, 183 aa, Homo Sapiens
MTTASTSQVRQNYHQDSEAAINRQINLELYASYVYLSMSYYFDRDDVALKNFAKYFLHQSHEEREHAEKLMKLQNQRGGRIFLQDIKKPDCDDWESGLNAMECALHLEKNVNQSLLELHKLATDKNDPHLCDFIETHYLNEQVKAIKELGDHVTNLRKMGAPESGLAEYLFDKHTLGDSDNES

SEQ ID NO: 162 - protein, 151 aa, Homo Sapiens
MCDFTEDQTAEFKEAFQLFDRTGDGKILYSQCGDVMRALGQNPTNAEVLKVLGNPKSDEMNVKVLDFEHFLPMLQTVAKNKDQGTYEDYVEGLRVFDKEGNGTVMGAEIRHVLVTLGEKMTEEEVEMLVAGHEDSNGCINYEAFVRHILSG

SEQ ID NO: 163 - protein, 1541 aa, Homo Sapiens
MSFLEEARAAGRAVVLALVLLLLPAVPVGASVPPRPLLPLQPGMPHVCAEQELTLVGRRQPCVQALSHTVPVWKAGCGWQAWCVGHERRTVYYMGYRQVYTTEARTVLRCCRGWMQQPDEEGCLSAECSASLCFHGGRCVPGSAQPCHCPPGFQGPRCQYDVDECRTHNGGCQHRCVNTPGSYLCECKPGFRLHTDSRTCLAINSCALGNGGCQHHCVQLTITRHRCQCRPGFQLQEDGRHCVRRSPCANRNGSCMHRCQVVRGLARCECHVGYQLAADGKACEDVDECAAGLAQCAHGCLNTQGSFKCVCHAGYELGADGRQCYRIEMEIVNSCEANNGGCSHGCSHTSAGPLCTCPRGYELDTDQRTCIDVDDCADSPCCQQVCTNNPGGYECGCYAGYRLSADGCGCEDVDECASSRGGCEHHCTNLAGSFQCSCEAGYRLHEDRRGCSPLEEPMVDLDGELPFVRPLPHIAVLQDELPQLFQDDDVGADEEEAELRGEHTLTEKFVCLDDSFGHDCSLTCDDCRNGGTCLLGLDGCDCPEGWTGLICNETCPPDTFGKNCSFSCSCQNGGTCDSVTGACRCPPGVSGTNCEDGCPKGYYGKHCRKKCNCANRGRCHRLYGACLCDPGLYGRFCHLTCPPWAFGPGCSEECQCVQPHTQSCDKRDGSCSCKAGFRGERCQAECELGYFGPGCWQACTCPVGVACDSVSGECGKRCPAGFQGEDCGQECPVGTFGVNCSSSCSCGGAPCHGVTGQCRCPPGRTGEDCEADCPEGRWGLGCQEICPACQHAARCDPETGACLCLPGFVGSRCQDVCPAGWYGPSCQTRCSCANDGHCHPATGHCSCAPGWTGFSCQRACDTGHWGPDCSHPCNCSAGHGSCDAISGLCLCEAGYVGPRCEQQCPQGHFGPGCEQRCQCQHGAACDHVSGACTCPAGWRGTFCEHACPAGFFGLDCRSACNCTAGAACDAVNGSCLCPAGRRGPRCAETCPAHTYGHNCSQACACFNGASCDPVHGQCHCAPGWMGPSCLQACPAGLYGDNCRHSCLCQNGGTCDPVSGHCACPEGWAGLACEKECLPRDVRAGCRHSGGCLNGGLCDPHTGRCLCPAGWTGDKCQSPCLRGWFGEACAQRCSCPPGAACHHVTGACRCPPGFTGSGCEQACPPGSFGEDCAQMCQCPGENPACHPATGTCSCAAGYHGPSCQQRCPPGRYGPGCEQLCGCLNGGSCDAATGACRCPTGFLGTDCNLTCPQGRFGPNCTHVCGCGQGAACDPVTGTCLCPPGRAGVRCERGCPQNRFGVGCEHTCSCRNGGLCHASNGSCSCGLGWTGRHCELACPPGRYGAACHLECSCHNNSTCEPATGTCRCGPGFYGQACEHPCPPGFHGAGCQGLCWCQHGAPCDPISGRCLCPAGFHGHFCERGCEPGSFGEGCHQRCDCDGGAPCDPVTGLCLCPPGRSGATCNLDCRRGQFGPSCTLHCDCGGGADCDPVSGQCHCVDGYMGPTCREGGPLRLPENPSLAQGSAGTLPASSRPTSRSGGPARH

SEQ ID NO: 164 - protein, 2115 aa, Homo Sapiens
MTLHATRGAALLSWVNSLHVADPVEAVLQLQDCSIFIKIIDRIHGTEEGQQILKQPVSERLDFVCSFLQKNRKHPSSPECLVSAQKVLEGSELELAKMTMLLLYHSTMSSKSPRDWEQFEYKIQAELAVILKFVLDHEDGLNLNEDLENFLQKAPVPSTCSSTFPEELSPPSHQAKREIRFLELQKVASSSSGNNFLSGSPASPMGDILQTPQFQMRRLKKQLADERSNRDELELELAENRKLLTEKDAQIAMMQQRIDRLALLNEKQAASPLEPKELEELRDKNESLTMRLHETLKQCQDLKTEKSQMDRKINQLSEENGDLSFKLREFASHLQQLQDALNELTEEHSKATQEWLEKQAQLEKELSAALQDKKCLEEKNEILQGKLSQLEEHLSQLQDNPPQEKGEVLGDVLQLETLKQEAATLAANNTQLQARVEMLETERGQQEAKLLAERGHFEEEKQQLSSLITDLQSSISNLSQAKEELEQASQAHGARLTAQVASLTSELTTLNATIQQQDQELAGLKQQAKEKQAQLAQTLQQQEQASQGLRHQVEQLSSSLKQKEQQLKEVAEKQEATRQDHAQQLATAAEEREASLRERDAALKQLEALEKEKAAKLEILQQQLQVANEARDSAQTSVTQAQREKAELSRKVEELQACVETARQEQHEAQAQVAELELQLRSEQQKATEKERVAQEKDQLQEQLQALKESLKVTKGSLEEEKRRAADALEEQQRCISELKAETRSLVEQHKRERKELEEERAGRKGLEARLQQLGEAHQAETEVLRRELAEAMAAQHTAESECEQLVKEVAAWRERYEDSQQEEAQYGAMFQEQLMTLKEECEKARQELQEAKEKVAGIESHSELQISRQQNELAELHANLARALQQVQEKEVRAQKLADDLSTLQEKMAATSKEVARLETLVRKAGEQQETASRELVKEPARAGDRQPEWLEEQQGRQFCSTQAALQAMEREAEQMGNELERLRAALMESQGQQQEERGQQEREVARLTQERGRAQADLALEKAARAELEMRLQNALNEQRVEFATLQEALAHALTEKEGKDQELAKLRGLEAAQIKELEELRQTVKQLKEQLAKKEKEHASGSGAQSEAAGRTEPTGPKLEALRAEVSKLEQQCQKQQEQADSLERSLEAERASRAERDSALETLQGQLEEKAQELGHSQSALASAQRELAAFRTKVQDHSKAEDEWKAQVARGRQEAERKNSLISSLEEEVSILNRQVLEKEGESKELKRLVMAESEKSQKLEERLRLLQAETASNSARAAERSSALREEVQSLREEAEKQRVASENLRQELTSQAERAEELGQELKAWQEKFFQKEQALSTLQLEHTSTQALVSELLPAKHLCQQLQAEQAAAEKRHREELEQSKQAAGGLRAELLRAQRELGELIPLRQKVAEQERTAQQLRAEKASYAEQLSMLKKAHGLLAEENRGLGERANLGRQFLEVELDQAREKYVQELAAVRADAETRLAEVQREAQSTARELEVMTAKYEGAKVKVLEERQRFQEERQKLTAQVEQLEVFQREQTKQVEELSKKLADSDQASKVQQQKLKAVQAQGGESQQEAQRLQAQLNELQAQLSQKEQAAEHYKLQMEKAKTHYDAKKQQNQELQEQLRSLEQLQKENKELRAEAERLGHELQQAGLKTKEAEQTCRHLTAQVRSLEAQVAHADQQLRDLGKFQVATDALKSREPQAKPQLDLSIDSLDLSCEEGTPLSITSKLPRTQPDGTSVPGEPASPISQRLPPKVESLESLYFTPIPARSQAPLESSLDSLGDVFLDSGRKTRSARRRTTQIINITMTKKLDVEEPDSANSSFYSTRSAPASQASLRATSSTQSLARLGSPDYGNSALLSLPGYRPTTRSSARRSQAGVSSGAPPGRNSFYMGTCQDEPEQLDDWNRIAELQQRNRVCPPHLKTCYPLESRPSLSLGTITDEEMKTGDPQETLRRASMQPIQIAEGTGITTRQQRKRVSLEPHQGPGTPESKKATSCFPRPMTPRDRHEGRKQSTTEAQKKAAPASTKQADRRQSMAFSILNTPKKLGNSLLRRGASKKALSKASPNTRSGTRRSPRIATTTASAATAAAIGATPRAKGKAKH

SEQ ID NO: 165 - protein, 287 aa, Homo Sapiens
VAACPGSLDCALKRRARCPPGAHACGPCLQPFQEDQQGLCVPRMRRPPGGGRPQPRLEDEIDFLAQELARKESGHSTPPLPKDRQRLPEPATLGFSARGQGLELGLPSTPGTPTPTPHTSLGSPVSSDPVHMSPLEPRGGQGDGLALVLILAFCVAGAAALSVASLCWCRLQREIRLTQKADYATAKAPGSPAAPRISPGDQRLAQSAEMYHYQHQRQQMLCLERHKEPPKELDTASSDEENEDGDFTVYDCPGLAPTGEMEVRNPLFDHAALSAPLPAPSSPPALP

SEQ ID NO: 166 - protein, 298 aa, Homo Sapiens
MTEQAISFAKDFLAGGIAAAISKTAVAPIERVKLLLQVQHASKQIAADKQYKGIVDCIVRIPKEQGVLSFWRGNLANVIRYFPTQALNFAFKDKYKQIFLGGVDKHTQFWRYFAGNLASGGAAGATSLCFVYPLDFARTRLAADVGKSGTEREFRGLGDCLVKITKSDGIRGLYQGFSVSVQGIIIYRAAYFGVYDTAKGMLPDPKNTHIVVSWMIAQTVTAVAGVVSYPFDTVRRRMMMQSGRKGADIMYTGTVDCWRKIFRDEGGKAFFKGAWSNVLRGMGGAFVLVLYDELKKVI

SEQ ID NO: 167 - protein, 208 aa, Homo Sapiens
MDPFLVLLHSVSSSLSSSELTELKFLCLGRVGKRKLERVQSGLDLFSMLLEQNDLEPGHTELLRELLASLRRHDLLRRVDDFEAGAAAGAAPGEEDLCAAFNVICDNVGKDWRRLARQLKVSDTKIDSIEDRYPRNLTERVRESLRIWKNTEKENATVAHLVGALRSCQMNLVADLVQEVQQARDLQNRSGAMSPMSWNSDASTSEAS

SEQ ID NO: 168 - protein, 271 aa, Homo Sapiens
MEAAAEPGNLAGVRHIILVLSGKGGVGKSTISTELALALRHAGKKVGILDVDLCGPSIPRMLGAQGRAVHQCDRGWAPVFLDREQSISLMSVGFLLEKPDEAVVWRGPKKNALIKQFVSDVAWGELDYLVVDTPPGTSDEHMATIEALRPYQPLGALVVTTPQAVSVGDVRRELTFCRKTGLRVMGIVENMSGFTCPHCTECTSVFSRGGGEELAQLAGVPFLGSVPLDPALMRTLEEGHDFIQEFPGSPAFAALTSIAQKILDATPACLP

SEQ ID NO: 169 - protein, 218 aa, Homo Sapiens
MGTRDDEYDYLFKVVLIGDSGVGKSNLLSRFTRNEFNLESKSTIGVEFATRSIQVDGKTIKAQIWDTAGQERYRAITSAYYRGAVGALLVYDIAKHLTYENVERWLKELRDHADSNIVIMLVGNKSDLRHLRAVPTDEARAFAEKNNLSFIETSALDSTNVEEAFKNILTEIYRIVSQKQIADRAAHDESPGNNVVDISVPPTTDGQKPNKLQCCQNL

SEQ ID NO: 170 - protein, 295 aa, Homo Sapiens
MDNSGKEAEAMALLAEAERKVKNSQSFFSGLFGGSSKIEEACEIYARAANMFKMAKNWSAAGNAFCQAAQLHLQLQSKHDAATCFVDAGNAFKKADPQEAINCLMRAIEIYTDMGRFTIAAKHHISIAEIYETELVDIEKAIAHYEQSADYYKGEESNSSANKCLLKVAGYAALLEQYQKAIDIYEQVGTNAMDSPLLKYSAKDYFFKAALCHFCIDMLNAKLAVQKYEELFPAFSDSRECKLMKKLLEAHEEQNVDSYTESVKEYDSISRLDQWLTTMLLRIKKTIQGDEEDLR

SEQ ID NO: 171 - protein, 445 aa, Homo Sapiens
MREIVHIQAGQCGNQIGAKFWEVISDEHGIDPTGSYHGDSDLQLERINVYYNEAAGNKYVPRAILVDLEPGTMDSVRSGPFGQIFRPDNFVFGQSGAGNNWAKGHYTEGAELVDSVLDVVRKESESCDCLQGFQLTHSLGGGTGSGMGTLLISKIREEYPDRIMNTFSVMPSPKVSDTVVEPYNATLSVHQLVENTDETYSIDNEALYDICFRTLKLTTPTYGDLNHLVSATMSGVTTCLRFPGQLNADLRKLAVNMVPFPRLHFFMPGFAPLTSRGSQQYRALTVPELTQQMFDSKNMMAACDPRHGRYLTVAAIFRGRMSMKEVDEQMLNVQNKNSSYFVEWIPNNVKTAVCDIPPRGLKMSATFIGNSTAIQELFKRISEQFTAMFRRKAFLHWYTGEGMDEMEFTEAESNMNDLVSEYQQYQDATADEQGEFEEEEGEDEA

SEQ ID NO: 172 - protein, 746 aa, Homo Sapiens
MQAKKRYFILLSAGSCLALLFYFGGLQFRASRSHSRREEHSGRNGLHHPSPDHFWPRFPDALRPFVPWDQLENEDSSVHISPRQKRDANSSIYKGKKCRMESCFDFTLCKKNGFKVYVYPQQKGEKIAESYQNILAAIEGSRFYTSDPSQACLFVLSLDTLDRDQLSPQYVHNLRSKVQSLHLWNNGRNHLIFNLYSGTWPDYTEDVGFDIGQAMLAKASISTENFRPNFDVSIPLFSKDHPRTGGERGFLKFNTIPPLRKYMLVFKGKRYLTGIGSDTRNALYHVHNGEDVVLLTTCKHGKDWQKHKDSRCDRDNTEYEKYDYREMLHNATFCLVPRGRRLGSFRFLEALQAACVPVMLSNGWELPFSEVINWNQAAVIGDERLLLQIPSTIRSIHQDKILALRQQTQFLWEAYFSSVEKIVLTTLEIIQDRIFKHISRNSLIWNKHPGGLFVLPQYSSYLGDFPYYYANLGLKPPSKFTAVIHAVTPLVSQSQPVLKLLVAAAKSQYCAQIIVLWNCDKPLPAKHRWPATAVPVVVIEGESKVMSSRFLPYDNIITDAVLSLDEDTVLSTTEVDFAFTVWQSFPERIVGYPARSHFWDNSKERWGYTSKWTNDYSMVLTGAAIYHKYYHYLYSHYLPASLKNMVDQLANCEDILMNFLVSAVTKLPPIKVTQKKQYKETMMGQTSRASRWADPDHFAQRQSCMNTFASWFGYMPLIHSQMRLDPVLFKDQVSILRKKYRDIERL

SEQ ID NO: 173 - protein, 462 aa, Homo Sapiens
MGKEKTHINIVVIGHVDSGKSTTTGHLIYKCGGIDKRTIEKFEKEAAEMGKGSFKYAWVLDKLKAERERGITIDISLWKFETSKYYVTIIDAPGHRDFIKNMITGTSQADCAVLIVAAGVGEFEAGISKNGQTREHALLAYTLGVKQLIVGVNKMDSTEPPYSQKRYEEIVKEVSTYIKKIGYNPDTVAFVPISGWNGDNMLEPSANMPWFKGWKVTRKDGNASGTTLLEALDCILPPTRPTDKPLRLPLQDVYKIGGIGTVPVGRVETGVLKPGMVVTFAPVNVTTEVKSVEMHHEALSEALPGDNVGFNVKNVSVKDVRRGNVAGDSKNDPPMEAAGFTAQVIILNHPGQISAGYAPVLDCHTAHIACKFAELKEKIDRRSGKKLEDGPKFLKSGDAAIVDMVPGKPMCVESFSDYPPLGRFAVRDMRQTVAVGVIKAVDKKAAGAGKVTKSAQKAQKAK

SEQ ID NO: 174 - protein, 287 aa, Homo Sapiens
MELERIVSAALLAFVQTHLPEADLSGLDEVIFSYVLGVLEDLGPSGPSEENFDMEAFTEMMEAYVPGFAHIPRGTIGDMMQKLSGQLSDARNKENLQPQSSGVQGQVPISPEPLQRPEMLKEETRSSAAAAADTQDEATGAEEELLPGVDVLLEVFPTCSVEQAQWVLAKARGDLEEAVQMLVEGKEEGPAAWEGPNQDLPRRLRGPQKDELKSFILQKYMMVDSAEDQKIHRPMAPKEAPKKLIRYIDNQVVSTKGERFKDVRNPEAEEMKATYINLKPARKYRFH

SEQ ID NO: 175 - protein, 451 aa, Homo Sapiens
MRECISIHVGQAGVQIGNACWELYCLEHGIQPDGQMPSDKTIGGGDDSFNTFFSETGAGKHVPRAVFVDLEPTVIDEVRTGTYRQLFHPEQLITGKEDAANNYARGHYTIGKEIIDLVLDRIRKLADQCTGLQGFLVFHSFGGGTGSGFTSLLMERLSVDYGKKSKLEFSIYPAPQVSTAVVEPYNSILTTHTTLEHSDCAFMVDNEAIYDICRRNLDIERPTYTNLNRLIGQIVSSITASLRFDGALNVDLTEFQTNLVPYPRIHFPLATYAPVISAEKAYHEQLSVAEITNACFEPANQMVKCDPRHGKYMACCLLYRGDVVPKDVNAAIATIKTKRTIQFVDWCPTGFKVGINYQPPTVVPGGDLAKVQRAVCMLSNTTAIAEAWARLDHKFDLMYAKRAFVHWYVGEGMEEGEFSEAREDMAALEKDYEEVGVDSVEGEGEEEGEEY

SEQ ID NO: 176 - protein, 477 aa, Homo Sapiens
MFPVFPCTLLAPPFPVLGLDSRGVGGLMNSFPPPQGHAQNPLQVGAELQSRFFASQGCAQSPFQAAPAPPPTPQAPAAEPLQVDLLPVLAAAQESAAAAAAAAAAAAAVAAAPPAPAAASTVDTAALKQPPAPPPPPPPVSAPAAEAAPPASAATIAAAAATAVVAPTSTVAVAPVASALEKKTKSKGPYICALCAKEFKNGYNLRRHEAIHTGAKAGRVPSGAMKMPTMVPLSLLSVPQLSGAGGGGGEAGAGGGAAAVAAGGVVTTTASGKRIRKNHACEMCGKAFRDVYHLNRHKLSHSDEKPYQCPVCQQRFKRKDRMSYHVRSHDGAVHKPYNCSHCGKSFSRPDHLNSHVRQVHSTERPFKCEKCEAAFATKDRLRAHTVRHEEKVPCHVCGKMLSSAYISDHMKVHSQGPHHVCELCNKGTGEVCPMAAAAAAAAAAAAAAVAAPPTAVGSLSGAEGVPVSSQPLPSQPW

SEQ ID NO: 177 - DNA, 955 bp, Homo Sapiens
tgagaggtcgcatcaccatcaccatcacggatcctatttaggtgacactatagaatcgtcgacccacgcgtccgcggacgcgtgggataaaactctgtttctgaaaacactaaatgaacaacgcctggaaggagaattttgtgatattgctattgtggttgaggatgtgaaattcagagcacacagatgtgttcttgctgcctgcagcacctactttaaaaagcttttcaagaagcttgaggttgatagttcttcggtcatagaaatagattttcttcgttctgatatatttgaagaggtcctgaactacatgtacacagcaaagatttccgtgaaaaaagaagatgttaacttaatgatgtcatcgggtcagattcttggtatccgatttttggataaactgtgttctcagaagcgtgatgtgtccagtcccgatgaaaacaatggtcagtccaaaagtaagtattgccttaaaataaatcgccccattggagatgctgctgacacccaggatgatgatgtagaggaaatcggggatcaggatgacagtccttctgatgacacagtagaaggcacacccccgagtcaggaggacggcaagtcgcccaccacaacgctcagggttcaggaagcgatcctgaaagagctggggagtgaggaagttcggaaggtcaattgctacggccaggaagtagaatccatggagaccccagaatcaaaagacttggggtcccagacccctcaagccttaacatttaatgatgggatgagtgaagtgaaagatgaacagacaccaggctggacaacagccgccagtgacatgaagtttgagtatttgctttatggtcaccatcgggagcagattgcctgccaggcgtgtgggaagacgttttctgatgaaaggcagattgaggaagcatgagaaactccacacggcggacaggccatttgtttg

SEQ ID NO: 178 - DNA, 913 bp, Homo Sapiens
tgagaggatcgcatcaccatcaccatcacggatcctatttaggtgacactatagaatcgtcgacccacgcgtccggctgccctttgttaaagtctcttgttttcagcagccactgtaaagcagtgagtggctactcagaccaggttgtccatcagcggagatcagctacctcctcgctgcgtcgctgcctgctcactgagctgccatcttttttgtgtgtggccagtccacgagttaccgcagtgccattggattcttactgcaatgaccgaagtgcagaatatgaaaggcgagttctgaaggaaggagggagtctggcagccaagcagtgtttgttgaatggggcccctgaactggctgcagactggctaaatagacgatcacagttcttcccagagccagctggaggtctgtggagcatcagacctcagaatggctggtctttcatcaggattccaggcaaggagagcctcatcactgacagtggaaagctgtatgcccttgatgtcctgctgactcggctcaagtctcaagggcatagggtccttatctactcccagatgaccaggatgatagacctactggaggaatacatggtttacaggaagcatacctacatgaggcttgatggctcatccaagatctcggagaggcgagacatggttgctgattttcagaacaggaatgacatctttgtgttcctgttaagcacacgagctggaggactgggtatcaatctcactgctgcagacacagtgattttctatgatagcgactggaaccccactgtggaccagcaggccatggacagggcccaccgcttagggcagacaaagcaggttactgtgtaccggctcatctgtaaaggcaccattgaagaacgcattctgcaaagagccaaggagaagagtga

SEQ ID NO: 179 - DNA, 940 bp, Homo Sapiens
tgagaggatcgcatcaccatcaccatcacggatcctatttaggtgacactatagaatcgtcgacccacgcgtccggtgatttggtaactgaagacactggtgtgagaaatgaagctcaagaagagatctataaaaagggacagtccaaaagaatatggggtgagctctacaaggtgatagattcatcagatgttgtagttcaagttcttgatgctagagatccaatgggtactcgttcccctcacattgaaacttacctgaagaaggaaaaaccttggaaacacctcatttttgtacttaacaaatgtgaccttgttccaacctgggcaacaaaacggtgggttgctgtcctctcccaggattatccaacacttgctttccatgcaagccttactaacccgtttggcaagggagcattcattcagcttctgcggcagtttggaaagttgcacactgacaagaaacagatcagtgttgggttcattggctatccaaatgttggcaagagctctgtgataaatacattgcgttctaagaaagtttgcaacgtggctcccattgcaggtgaaacaaaggtctggcagtatattactttgatgcgtcggatattcctgattgactgtccaggtgtggtttacccctctgaggactccgagacagacattgtgctaaaaggagttgttcaagtagaaaaaattaagagtcctgaagaccacattggtgctgtacttgaacgagcaaagccagaatatatcagcaaaacatacaagattgattcttgggagaatgctgaggactttcttgagaagctcgctttccggactgggaagttactaaagggtggagagcccgacttgcagactgtgggtaagatggtcctcaatgactggcagaggggccggattcctttctttgtcaagccacccaatgcagagccact

SEQ ID NO: 180 - DNA, 915 bp, Homo Sapiens
ccatcaccatcacggatcctatttaggtgacactatagaatcgtcgacccacgcgtccgggaggcgggtgggtcaaggtaactctgggctacagagtccttgctgggggttcggggagcgcttggaccccggcttctgggacgcgtcaggagaagggagcactggctttgctttcatcaggccaaagatgcctttctttgggaatacgttcagtccgaagaagacacctcctcggaagtcggcatctctctccaacctgcattctttggatcgatcaacccgggaggtggagctgggcttggaatacggatccccgactatgaacctggcagggcaaagcctgaagtttgaaaatggccagtggatagcagagacaggggttagtggcggtgtggaccggagggaggttcagcgccttcgcaggcggaaccagcagttggaggaagagaacaatctcttgcggctgaaagtggacatcttattagacatgctttcagagtccactgctgaatcccacttaatggagaaggaactggatgaactgaggatcagccggaagagaaaatgaagaccccagagacatttattggggagtaggatgtggctgagtgctttttttttggccagactagcggattcagtcctggaagagagtatcatataatgagacccacaggcactggcacccttgggttggcaatagaaggtgacatggaatggagaaaaccaagattccagatggggatagtaactagaaggtgcttcagatgcactgcctgcgggtgccagtctgaaaaaccagaccgcacagaggccctggggctgctgatgagctttttggtgctctccacacacaagctcgcaaacacacatgtcccagaatagctctgttgggttgtgttgggagaagcggct

SEQ ID NO: 181 - DNA, 793 bp, Homo Sapiens
  misc_feature (1)..(1): n is a, c, g, or t
  misc_feature (4)..(4): n is a, c, g, or t
  misc_feature (743)..(743): n is a, c, g, or t
  misc_feature (759)..(759): n is a, c, g, or t
  misc_feature (791)..(791): n is a, c, g, or t
nacnatgagaggatcgcatcaccatcaccatcacggatcctatttaggtgacactatagaatcgtcgacccacgcgtccgcccacgcgtccgcccacgcgtccggttccttcccctctgagcccgggcttcgccgctctgactctctcttgtccttccgcctggacctcgaccttgggccctcactcctcagcgagctgctaggggtcatgagcctgccagaagcccctgcagctgagactccagcccccgctgcaaaccccccagcccctactgcaaaccccacgggtcctgctgcaaaccccccagccactactgcaaaccccccagcacctgccgcaacccccacgggtcctgctgcaaatcccccagcccctgccgcaagctccacaccccatggacactgtcccaatggggtaacagctgggttgggcccagtggctgaggtgaagtccagcccagtgggagggggtccccgaggacctgctggccctgccctcggcaggcactggggagcaggctgggatggcggccaccactacccagagatggatgcgcggcaggagcgggtggaggtgctgccccaagcccgggcctcctgggagagcctggacgaagagtggaagggcgccccaggcaggcagcaggaccccagtgcccagcacagtgcaagcaaacaccttttgaatttgcggatgctgaggaggatgatgaggtcaaggtgtgaggggctggggcacggtncccagggcccccaccntaggtgcagagccggcccctcacctaacagcntg

SEQ ID NO: 182 - DNA, 814 bp, Homo Sapiens
  misc_feature (3)..(3): n is a, c, g, or t
  misc_feature (783)..(783): n is a, c, g, or t
  misc_feature (792)..(792): n is a, c, g, or t
ttnagaggagaattaactatgagaggatcgcatcaccatcaccatcacggatcctatttaggtgacactatagaatcgtcgacccacgcgtccgcggacgcgtgggttccagtgcgggcagcagaaagtatccgtcgcatatttgatgcaaacacaaaacccaacttgaatttacaggtgctgtccaaccctgagtttctggcagagggaacagccatcaaggacctaaagaacccagacagagtactgattggaggggatgaaactccagagggccagagagctgtgcaggccctgtgtgctgtatatgagcactgggttcccagagaaaagatcctcaccactaatacttggtcttcagagctttccaaactggcagcaaatgcttttcttgcccagagaataagcagcattaactccataagtgctctgtgtgaagcaacaggagctgatgtagaagaggtagcaacagcgattggaatggaccagagaattggaaacaagtttctaaaagccagtgttgggtttggtgggagctgtttccaaaaggatgttctgaatttggtttatctctgtgaggctctgaatttgccagaagtagctcgttattggcagcaggtcatagacatgaatgactaccagaggaggaggtttgcttcccggatcatagatagtctgtttaatacagtaactgataagaagatagctattttgggatttgcattcaaaaaggacactggtgatacaagagaatcttctagtatatatattagcaaatatttngatggatgnaaggtgcacatctacatatata

SEQ ID NO: 183 - DNA, 1220 bp, Homo Sapiens
  misc_feature (958)..(958): n is a, c, g, or t
  misc_feature (994)..(994): n is a, c, g, or t
  misc_feature (1013)..(1013): n is a, c, g, or t
  misc_feature (1027)..(1027): n is a, c, g, or t
  misc_feature (1036)..(1036): n is a, c, g, or t
  misc_feature (1041)..(1041): n is a, c, g, or t
  misc_feature (1055)..(1055): n is a, c, g, or t
  misc_feature (1057)..(1057): n is a, c, g, or t
  misc_feature (1061)..(1061): n is a, c, g, or t
  misc_feature (1066)..(1066): n is a, c, g, or t
  misc_feature (1068)..(1068): n is a, c, g, or t
  misc_feature (1074)..(1074): n is a, c, g, or t
  misc_feature (1085)..(1085): n is a, c, g, or t
  misc_feature (1092)..(1092): n is a, c, g, or t
  misc_feature (1099)..(1099): n is a, c, g, or t
  misc_feature (1106)..(1106): n is a, c, g, or t
  misc_feature (1131)..(1131): n is a, c, g, or t
  misc_feature (1147)..(1147): n is a, c, g, or t
  misc_feature (1152)..(1154): n is a, c, g, or t
  misc_feature (1162)..(1162): n is a, c, g, or t
  misc_feature (1172)..(1172): n is a, c, g, or t
  misc_feature (1174)..(1174): n is a, c, g, or t
  misc_feature (1188)..(1188): n is a, c, g, or t
  misc_feature (1195)..(1195): n is a, c, g, or t
  misc_feature (1201)..(1202): n is a, c, g, or t
tagagaaaattactatgagaggatcgcatcaccatcaccatcacggatcctatttaggtgacactatagaatcgtcgacccacgcgtccgggttcctggaggacaacgtctgctacgcgctgcccgtgtcgtgcgtgcgcgacttcagcccccgctcgcggctggattttgacaaccagaaggtgtacgccgtgtaccggggcccggaggaattgggcgccgggcccgagagccccccgcgcgccccccgcgactggggcgcgctgttgctccacaaggcccagatcctggcgctggcagaagacaaatctgaccttgaaaacagtgtgatgcagaagaaaataaaaatccccaagctttctcttaatcatgtagaagaagatggagaggttaaagattatggggaagaagatttacagcttagacacatcaagagacctgaggggcggaagccgagcgaagtggcgcacaagagcatcgaggcagtggtggctcggctagagaagcagaacggcctgagcctgggccatagcacgtgtccggaagaggtcttcgtggaggcctcgccaggcacagaggacatggacagtctagaagatgctgtggtgccccgggctctgtatgaggagctgctgcgcaactaccagcagcaacaggaagagatgcgccacctccagcaggagctggagcggactcggaggcagctggtacaacaggccaagaagctcaaggagtacggggcacttgtgtctgaaatgaaggagctccgtgaccttaaccggaggctccaggacgtgctgctcctgcggcttggcagcggtcccgccattgatctggaaaaagtaaaagtcagaatgtctcgagcccgagccggagttacggagcactttcagtgaggaagcaaatacgtcgtcctattaccccgctcctgcgcctgtcatggacaagtatatcctanacaatggcaaggtccatctggaaagcgggatttggnttgatgaagaaaaatggcnccagctacaattancccaagganattcnagtacccgaaaaantnggcngtttnanttgggnaaaaaatgttntgaaaanaaaaacnttccagngtccccccaaaaaaaaaaaatgcantccctaaacccccctntcccnnnaaataaanttttcaaaangnttttttaaaaaatnccaaaanttgggnnaactgaattgccaaaaac

SEQ ID NO: 184 - DNA, 713 bp, Homo Sapiens
  misc_feature (528)..(528): n is a, c, g, or t
  misc_feature (564)..(564): n is a, c, g, or t
  misc_feature (628)..(628): n is a, c, g, or t
  misc_feature (640)..(640): n is a, c, g, or t
  misc_feature (644)..(644): n is a, c, g, or t
  misc_feature (646)..(647): n is a, c, g, or t
  misc_feature (665)..(665): n is a, c, g, or t
  misc_feature (668)..(668): n is a, c, g, or t
  misc_feature (674)..(674): n is a, c, g, or t
  misc_feature (678)..(679): n is a, c, g, or t
  misc_feature (684)..(684): n is a, c, g, or t
  misc_feature (686)..(686): n is a, c, g, or t
  misc_feature (692)..(692): n is a, c, g, or t
  misc_feature (701)..(701): n is a, c, g, or t
  misc_feature (707)..(707): n is a, c, g, or t
  misc_feature (712)..(713): n is a, c, g, or t
ttcttaaagaggagaattaactatgagaggatcgcatcaccatcaccatcacggatcctatttaggtgacactatagaatcgtcgacccacgcgtccgggaagtcccgtaacggagacgctggtcaggacgttcccacctcctctgacactgccgagtccgatcggagaggggtcaccgcctccttcagcgaggaggaggggggcggagcccgactcaggatcatggattttcctggtcactttgaacaaatcttccagcagctgaactaccagagacttcatggccagctctgtgattgtgtcattgtagtggggaatagacactttaaagcccaccgctccgtgctggcagcatgcagcacgcatttccgagccctgttctcagtggcagaaggagatcagaccatgaacatgatccagctggatagcgaggtggtgacagcagaggcctttgctgcactgattgacatgatgtatacctccaccctcatgctgggggagagcaatgtaatggatgtcttattggnagcctctcacctgcatttgaactctgttgttaaggnatgtaaacattacttaacgacaaggacgctgcccatgtctccccccagtgagcgcgttcaggancagagcgcccgnatgnanngctcctttatgctacagnagntgggantaannatcgngngctcanccctcattncagcanaatgnn

SEQ ID NO: 185 - DNA, 591 bp, Homo Sapiens
attagagaaattactatgagaggatcgcatcaccatcaccatcacggatcctatttaggtgacactatagaatcgtcgacccacgcgtccgcgagagctgcgaaaggcgagagctgcgaagggccaggtgtcgggcgctgtttctcgttttcatcatatagacaaaacagccctgctgcaaagatggtcaacgtacctaaaacccgaagaaccttctgtaagaagtgtggcaagcatcagcctcacaaagtgacacagtataagaagggcaaggattctttgtatgcccagggaaggaggcgctatgatcggaagcagagtggctatggtgggcagacaaagccaattttccggaagaaggctaagaccacaaagaagattgtgctaaggctggaatgtgttgagcctaactgcagatccaagaggatgctggctattaagagatgcaagcattttgaactgggaggagataagaagagaaagggccaagtgatccagttctaaactttgggatatttttcttcaattttgaagagaaaatggtgaagccatagaaaagttacccgagggaaaataaaaagaattcatttt

SEQ ID NO: 186 - DNA, 824 bp, Homo Sapiens
  misc_feature (2)..(2): n is a, c, g, or t
  misc_feature (97)..(98): n is a, c, g, or t
  misc_feature (106)..(106): n is a, c, g, or t
  misc_feature (109)..(109): n is a, c, g, or t
  misc_feature (115)..(115): n is a, c, g, or t
  misc_feature (120)..(120): n is a, c, g, or t
  misc_feature (124)..(125): n is a, c, g, or t
  misc_feature (130)..(130): n is a, c, g, or t
  misc_feature (133)..(133): n is a, c, g, or t
  misc_feature (142)..(142): n is a, c, g, or t
  misc_feature (144)..(144): n is a, c, g, or t
  misc_feature (148)..(148): n is a, c, g, or t
  misc_feature (156)..(156): n is a, c, g, or t
  misc_feature (162)..(162): n is a, c, g, or t
  misc_feature (166)..(166): n is a, c, g, or t
  misc_feature (168)..(168): n is a, c, g, or t
  misc_feature (179)..(179): n is a, c, g, or t
  misc_feature (210)..(210): n is a, c, g, or t
  misc_feature (231)..(232): n is a, c, g, or t
  misc_feature (237)..(237): n is a, c, g, or t
  misc_feature (242)..(242): n is a, c, g, or t
  misc_feature (262)..(264): n is a, c, g, or t
  misc_feature (284)..(284): n is a, c, g, or t
  misc_feature (288)..(288): n is a, c, g, or t
  misc_feature (294)..(294): n is a, c, g, or t
  misc_feature (311)..(311): n is a, c, g, or t
  misc_feature (332)..(332): n is a, c, g, or t
  misc_feature (344)..(344): n is a, c, g, or t
  misc_feature (424)..(424): n is a, c, g, or t
  misc_feature (429)..(429): n is a, c, g, or t
  misc_feature (436)..(437): n is a, c, g, or t
  misc_feature (440)..(440): n is a, c, g, or t
  misc_feature (443)..(443): n is a, c, g, or t
  misc_feature (446)..(447): n is a, c, g, or t
  misc_feature (508)..(509): n is a, c, g, or t
  misc_feature (629)..(629): n is a, c, g, or t
  misc_feature (813)..(814): n is a, c, g, or t
tnagaggagaattaactatgagaggatcgcatcaccatcaccatcacggatcctatttaggtgacactatagaatcgtcgacccacgcgtccggtannccgcagcntgngcacancgccngggnngaganaantggatcccntncgangcccgtgncccaantaangncgccgccccgnggccgccttggaggtccccctccccactaanacgcctctttgttagcaccannccccncccgnacgctctctgttccactacnnntgggcggaacaatggcggancggnaaggcncagcacgacccaatggnccagctgctgggaacaagatntgtcaatttaanctggttctgctgggggagtctgcgatgaggcaaatccagcctcgtcctccgctttgtaaagggacagtttcacgagtacnagganagtacanntgnagnggnnttcctcacacagactgtctgcctggatgacacaacagtcaagtttgagatctgggacacanntggacaggagcggtatcacagcctggcccccatgtactatcggggggcccaggctgccatcgtggtctatgacatcaccaacacagatacatttgcacgggccaagaactgggtgaaggnagctacagaggcaggccagccccaacatcgtcattgcactcgcgggtaacaaggcagacctggccagcaagagagccgtggaattccaggaagcacaagcctatgcagacgacaacagtttgctgttcatggagacatcagcaaaagactgcaatgaacgtgaacgaaatcttcatggcaatannttaagaagct

SEQ ID NO: 187 - DNA, 771 bp, Homo Sapiens
  misc_feature (2)..(2): n is a, c, g, or t
  misc_feature (4)..(4): n is a, c, g, or t
  misc_feature (647)..(647): n is a, c, g, or t
tnanctatgagaggatcgcatcaccatcaccatcacggatcctatttaggtgacactatagaatcgtcgacccacgcgtccggccccacaccccaccagacagtgcgcctggaggccctggatgagagtggcagctactgggtcagtgacaagaggctgcccccctgctcactcagccaggccctcacctacttcctggacatcaccacacccccaacccagctgctgctccaaaagctggcccaggtggccacagaagagcctgagagacagaggctggaggccctgtgccagccctcagagtacagcaagtggaagttcaccaacagccccacattcctggaggtgctagaggagttcccgtccctgcgggtgtctgctggcttcctgctttcccagctccccattctgaagcccaggttctactccatcagctcctcccgggatcacacgcccacagagatccacctgactgtggccgtggtcacctaccacacccgagatggccagggtcccctgcaccacggcgtctgcagcacatggctcaacagcctgaagccccaagacccagtgccctgctttgtgcggaatgccagcggcttccacctccccgaggatcccctcccatccttgcatcctcatcgggncctggcacaggcatcgcgcccttccgcagtttctggcagcaacggctccatgactcccagcacaagggagtgcggggaggccgcatgaccttggtgtttgggtgccgccgcccaaatgaggacc

SEQ ID NO: 188 - DNA, 1380 bp, Homo Sapiens
  misc_feature (10)..(12): n is a, c, g, or t
  misc_feature (814)..(814): n is a, c, g, or t
  misc_feature (830)..(831): n is a, c, g, or t
  misc_feature (910)..(911): n is a, c, g, or t
  misc_feature (1014)..(1014): n is a, c, g, or t
  misc_feature (1267)..(1267): n is a, c, g, or t
  misc_feature (1286)..(1286): n is a, c, g, or t
  misc_feature (1301)..(1301): n is a, c, g, or t
gaatactccnnnttaagaaatactagagaggatgcatcccatcaccatcacggtcgacccacgcgtccgaacgagactcgtgccaaacttgatgagctttctgctaagcgagagactagtggagaaaaatccagacaattaagagatgctcagcaggatgcaagagataaaatggaggatatcgaacgccaagttagagaattgaaaacaaaaatttcagctatgaaagaagaaaaagaacagcttagtgctgaaagacaagagcagattaagcagaggactaagttggagcttaaagccaaggatttacaagatgaactagcaggcaatagtgaacaaaggaaacgtttattaaaagagaggcagaagctgcttgaaaaaatagaagaaaagcagaaagaactggcagaaacagaacccaaattcaacagtgtgaaagagaaagaagaacgaggaattgctagattggctcaagctacccaggaaagaacggatctttatgcaaagcagggtcgaggaagccagtttacatcaaaagaagaaagggataagtggattaaaaaggaactcaagtctttagatcaggctattaatgacaagaaaagacagattgctgctatacataaggatttggaagacactgaagcaaataaagagaaaaatctggagcagtataataaactggaccaggatcttaatgaagtcaaagctcgagtagaagaactggacagaaaatattacgaagtaaaaaataagaaagatgaactacaaagtgaaagaaactacttgtggagagaagagaatgcagaacagncagcacttgctgctannagagaagatctttgaaagaaagcacaacttcttagagcagcaacaggaaaagccattttaaatggaatagacagcatannacaagtgctagaccacttcccgtcgaaagggataaacagcatggtcaaatggctatcatggtattgaaatgataacttgaatgtgaccagcttctaccttgcntgaagtcatgctgaaacagttatttatccatgttggatccgatgatccgcccaaattttatgaagttaaaaatgatcttccggaaagtaatttctgctctaacagttaaggccggaaccccaactgaacaggagtatcccatgtgcaactggggaatcccatttcaaacttcaacttggtgaaaacctttgccaacggaattccccacatccgcttcattgtctttctttaagaacccctccccccccacttnctttccaccatcccccccnccatctcctcccacncccctccccccacttcatcccattctcccccctacccactctacctccaacttcacccctcttcccctcccattctccc

SEQ ID NO: 189 - DNA, 1317 bp, Homo Sapiens
  misc_feature (1)..(2): n is a, c, g, or t
  misc_feature (15)..(16): n is a, c, g, or t
nnccccccccccccnnctagagatactagagaggatgcatcaccatcaccatcacggtcgacccacgcgtccgccgaaaggaagaggaagaggcaccggtggccatggggctggaggcggcgcgcgagctggagtgcgcggcgctgggcacgctgctgcgggatccgcgggaggcggaacgcacgctgctgctggactgccgccccttcctggccttctgccggcgccacgtgcgcgccgcgcggccagtgccttggaacgcgctgctgcggcgccgcgcgcgcggccctcctgccgccgttctcgcctgcctgctgcccgaccgcgcgctgcggacgcgcctggtccgcggggagctggcgcgggccgtggtgctggacgagggcagtgcctcggtggcggagctccggcccgacagcccggctcatgtgctgctggccgcgctgctgcacgagacccgcgcggggcccactgccgtgtacttcctgcgaggaggcttcgacggcttccagggctgctgtcccgatctgtgctctgaggcccccgcccctgcgctgccgccaacaggggacaaaaccagccgctccgactccagggctcctgtctacgaccagggtggccctgcggagatcttgccctacctgttcctgagcagctgcattcactcctcagacctgtcggggctgcaggcctgtgccatcacaagcgtcctcagcgtgtccggcagctggcccaaccacttggagggcttttaggctaccacaacaatgctgtgtctccgcacactacagccgccaactcccccaatacccctgctccctttccgacaccatcctcctctctacaaagcgcgggctccaaacctttcatacccctgaaccacgaaaaccaccaaaccatccaacacaatttcccaaacaccccatagcccatgcctcttcaatccttactctcctctatcaacactactgaaatccactgaaccctacccctaccccacctgcaccccaccccaccatatcatcactacaccccccccccccactcaccaaatcaggcgaccagaaacatctccccccactaaccaagccctccaatcctttcaaatctcctacctcttcacaatccataataaacatcacctaacccacccacacactattcaatgaccatcctactcatacgcccatcaaaacatccacacctcccatcttcctcaccaaactctccccatactcactcaaactacgcattaccgtcatccgtcgctaattccacccctcacactcactacatggctctctaaataatcccagc

SEQ ID NO: 190 - DNA, 1193 bp, Homo Sapiens
  misc_feature (1)..(1): n is a, c, g, or t
  misc_feature (800)..(800): n is a, c, g, or t
  misc_feature (822)..(822): n is a, c, g, or t
  misc_feature (857)..(857): n is a, c, g, or t
  misc_feature (876)..(876): n is a, c, g, or t
  misc_feature (904)..(904): n is a, c, g, or t
  misc_feature (959)..(959): n is a, c, g, or t
  misc_feature (964)..(964): n is a, c, g, or t
  misc_feature (971)..(971): n is a, c, g, or t
  misc_feature (991)..(991): n is a, c, g, or t
  misc_feature (1002)..(1002): n is a, c, g, or t
  misc_feature (1016)..(1016): n is a, c, g, or t
  misc_feature (1018)..(1018): n is a, c, g, or t
  misc_feature (1025)..(1025): n is a, c, g, or t
  misc_feature (1036)..(1036): n is a, c, g, or t
  misc_feature (1056)..(1056): n is a, c, g, or t
  misc_feature (1064)..(1064): n is a, c, g, or t
  misc_feature (1073)..(1073): n is a, c, g, or t
  misc_feature (1082)..(1082): n is a, c, g, or t
  misc_feature (1084)..(1084): n is a, c, g, or t
  misc_feature (1100)..(1100): n is a, c, g, or t
  misc_feature (1106)..(1106): n is a, c, g, or t
  misc_feature (1108)..(1108): n is a, c, g, or t
  misc_feature (1111)..(1111): n is a, c, g, or t
  misc_feature (1113)..(1113): n is a, c, g, or t
  misc_feature (1121)..(1122): n is a, c, g, or t
  misc_feature (1126)..(1127): n is a, c, g, or t
  misc_feature (1131)..(1132): n is a, c, g, or t
  misc_feature (1145)..(1145): n is a, c, g, or t
  misc_feature (1149)..(1149): n is a, c, g, or t
  misc_feature (1152)..(1152): n is a, c, g, or t
  misc_feature (1157)..(1157): n is a, c, g, or t
  misc_feature (1167)..(1167): n is a, c, g, or t
  misc_feature (1178)..(1179): n is a, c, g, or t
  misc_feature (1181)..(1181): n is a, c, g, or t
  misc_feature (1192)..(1192): n is a, c, g, or t
naattagaggaaaattactatgagaggatcgcatcaccattcaccatcacggatcctatttaggtgacactatagaatcgttcgacccacgcgtccggcagcttgcagcctggcagtccagcttctccaaggggcgtgagagtgttctgatcatctccacagacccagcacacaacatctcagatgcttttgaccagaagttctcaaaggtgcctaccaaggtcaaaggctatgacaacctctttgctatggagattgaccccagcctgggcgtggcggagctgcctgacgagttcttcgaggaggacaacatgctgagcatgggcaagaagatgatgcaggaggccatgagcgcatttcccggcatcgatgaggccatgagctatgccgaggtcatgaggctggtgaagggcatgaacttctcggtggtggtatttgacacggcacccacgggtcacaccctgaggctgctcaacttccccaccatcgtggagcggggcctgggccggcttatgcagatcaagaaccagatcagccctttcatctcacagatgtgcaacatgctgggcctgggggacatgaacgcagaccagctggcctccaagctggaggagacgctgcccgtcatccgctcagtcagcgaacagttcaaggaccctgagcagacaactttcatctgcgtatgcattgctgagttcctgtccctgtatgagacagagaggctgatccaggagctggccaagtgcaagattgacacacacaatataattgtcaaccagctcgtcttccccgaccccganaagccctgcaagatgtgtgagncccgtcacaagatccaggccaagtatctggaccanatggaggacctgtatgaanacttccacatcgggaagctgccgctgtnaccccatgaggggcggggggcaaacaaaggtcaacacctttctcggccttcctcntgganccctaanagccccccagtgcccaatanaaaatttgcanccccaaccggttgntntttaaanttaaccttcancctcccaacccctttggggnaaaatttngcaaaaagncccccccananaaaggggaaccccttngggcangnggnanggaggggnncctnncccnnggggggggggggnaaanttnaattnccccctaccnccccccctttnntnttcaaaaaggnt

SEQ ID NO: 191 - DNA, 904 bp, Homo Sapiens
catcaccatcaccatcacggatcctatttaggtgacactatagaatcgtcgacccacgcgtccgagctgaagaaaaccaagatcatctttgtggtgggtgggcctggctcagggaagggcacccagtgtgagaagatcgtgcagaagtatggctacacccacctctccaccggggacctcctgcggtccgaggtcagctcaggctcggccaggggcaagaagctgtcggaaatcatggagaaggggcagctggttccactggagacagtgttggacatgctccgggatgccatggtggccaaagtcaatacttccaaaggcttcctgattgatggctacccgcgggaggtgcagcaaggagaagagtttgagcgacggattggacagcccacactgctgctgtatgtggacgcaggccctgagaccatgacccagcggctcttgaaacgtggagagaccagcgggcgtgtggacgacaatgaggagaccatcaaaaagcggctggagacctattacaaggccacagaacccgtcatcgccttctatgagaaacgtggcattgtgcgcaaggtcaacgctgagggctccgtggacagtgtcttctcccaggtctgcacccacctggacgccctaaagtagcaacgctggagccgcttccccagctcagagccccgccccaccccgtcctgattcgaggtcctcctggcctgagcgcagcgcctccaccctgccctgctgagcacagacggaggaagccgcttatcctgttttcatggacagctgagcactaaaggaatttctaaggacatttggttttactgctttttctctgcttccagttggagttgattcatgtgcttgtgcctacctggccgcaagtccccagcccctcaaccctccgttc

SEQ ID NO: 192 - DNA, 1420 bp, Homo Sapiens
  misc_feature (924)..(924): n is a, c, g, or t
  misc_feature (946)..(946): n is a, c, g, or t
cccccctaagagatactagagaggacgcatcaccatcaccatcacggtcgacccacgcgtccgagccgggcactacaggaccggcatggtgacacagcccttcatgtggcctgccagcgccagcacttggcctgtgcccgctgcctgctggaagggcggccagagccaggcagaggaacatctcactctctggacctccagctgcaaaactggcaaggtctggcttgtctccacattgccacccttcagaagaaccaaccactcatggaattgctgcttcggaatggagctgacattgatgtgcaggagggcaccagtggtaagacagcgctgcacctggctgtggaaacccaagagcggggcctggtacagttcctgctccaggctggtgcccaggtagatgcccgcatgctgaacgggtgcacacccctgcacctggcagctggccggggtctcatgggcatctcatccactctgtgcaaggcgggtgctgactccctgctgcggaatgtggaggatgagacgccccaggacctgactgaggaatcccttgtccttttgccctttgatgacctgaagatctcagggaaactgctgctgtgtaccgactgaagccaggcagggtctgggatcctcagggctccacctctccatctggaagccggagccataactgctgcagtttgggcccaggctatgtgctcttctggtgccctagggactgctgtggccagagcctggggccagccagtacagtcctgagccgaggaggaagggactgcaagtggaagagagccagtctggaaggaagagctttccaggtggacagggcttcttggaagacccccaagccccaggtatcctgggtgaagcctgtttgcctctcttgaaaatggcaggtgctcttgtttaccccatgttggntcagccctgaactgcgcaccantaggaagctggactccccgcatgaaaaaaaaccgaaataggaccaaccagaacccggaaaggggtccctccttttgttgttgagaccccgaaaccccgtggttaaaaacttccccaaaaggtcctcactgacccccggggaaagacaacctcctaccttcccaccaaaggcaaccccccaaaacctcttccctttcaccccattccgcccccctcctcacgtcacatgtgcttttacccacacacccgcccaccttctccaacccctaacgaaaaaacttccccccacacctccctctttcatcacttctaacccccaatgccactatcttctcactcaacaaaccttcttcccccccatccatacgtcccccccaccaccactcccgccacccctgcatccccactccaccccactcacgacatccacacccaatcccacacgtaccaccaacacccttccaatcctccacct

SEQ ID NO: 193 - DNA, 894 bp, Homo Sapiens
ctatgagaggtcgcatcaccatcaccatcacggatcctatttaggtgacactatagaatcgtcgacccacgcgtccgcccacgcgtccgcccacgcgtccgcccacgcgtccgctgctttcagcaaacttatcatttatgacattgttgacatgcatgcagctgcagacatcttcaaacactacatgaagtattacaatgactatggtgatattattaaggaaacactgagtaaaaccaggcagattgataaaattcagtgtgccaagactctcattctcagtttgcaacagttatttaatgaacttgttcaagagcaaggtcccaacctagataggacatctgcccatgtcagtggcattaaagaactggcacgtcgctttgcccttacatttggattggaccagattaagacacgagaagcagttgccacacttcacaaggatggcatagagtttgcatttaaataccaaaatcagaaaggacaagagtatccacctcctaatctggcttttcttgaagtactaagtgaattttcttctaaacttcttcgacaggacaaaaagacagttcattcatacctagagaaattccttaccgagcagatgatggaaaggagggaggatgtatggcttccactcatctcctatagaaattcattagtcactgggggtgaagatgatagaatgtctgtgaacagtggaagtagcagcagcaaaacctcatcagtaaggaatgagaaaggacgacctccacttcataaaaaacgagtagaagatgagagtctggataacacatggctaaacaggactgacaccatgattcagactcctggccccctgccagcaccacaactcacatccactgtactgcgggagaacagtcggcccatggg

SEQ ID NO: 194 - DNA, 1023 bp, Homo Sapiens
  misc_feature (1)..(1): n is a, c, g, or t
  misc_feature (922)..(922): n is a, c, g, or t
  misc_feature (967)..(967): n is a, c, g, or t
  misc_feature (976)..(976): n is a, c, g, or t
  misc_feature (980)..(980): n is a, c, g, or t
  misc_feature (985)..(985): n is a, c, g, or t
  misc_feature (995)..(995): n is a, c, g, or t
  misc_feature (1007)..(1007): n is a, c, g, or t
  misc_feature (1022)..(1022): n is a, c, g, or t
naatagagaaattactatgagaggatcgcatcaccatcaccatcacggatcctatttaggtgacactatagaatcgtcgacccacgcgtccgggaaaagaatggcattgaagcagatttccagcaacaagtgctttgggggattgcagaaagtttttgaacatgacagtgttgaactaaactgcaaaatgaaatttgctgtctacttaccaccaaaggcagaaacaggaaagtgccctgcactgtattggctctcaggtttaacttgcacagagcaaaattttatatcaaaatctggttatcatcagtctgcttcagaacatggtcttgttgtcattgctccagataccagccctcgtggctgcaatattaaaggtgaagatgagagctgggactttggcactggtgctggattttatgttgatgccactgaagatccttggaaaaccaactacagaatgtactcttatgtcacagaggagcttccccaactcataaatgccaattttccagtggatccccaaaggatgtctatttttggccactccatgggaggtcatggagctctgatctgtgctttgaaaaatcctggaaaatacaaatctgtgtcagcatttgctccaatttgcaaccctgtactctgtccctggggcaaaaaagcctttagtggatatttgggaacagatcaaagtaaatggaaggcttatgatgctacccaccttgtgaaatcctatccaggatctcagctggacatactaattgatcaagggaaagatgaccagtttcttttagatggacagttactccctgataacttcatagctgcctgtacagaaaagaaaatccccgttgtttttcgattgcaagaggggttatgatcatagctactacttcattgcaacctttattactgaccacatcanacatcatgctaaatacctgaatgcatgaaaaaactcccaaataanaaaatcccntccngaatnataaaaagtngtaaaaatgcanctggtattgctgaanc

SEQ ID NO: 195 - DNA, 1153 bp, Homo Sapiens
  misc_feature (1)..(2): n is a, c, g, or t
  misc_feature (841)..(841): n is a, c, g, or t
  misc_feature (877)..(877): n is a, c, g, or t
  misc_feature (911)..(911): n is a, c, g, or t
  misc_feature (946)..(946): n is a, c, g, or t
  misc_feature (955)..(955): n is a, c, g, or t
  misc_feature (962)..(962): n is a, c, g, or t
  misc_feature (980)..(980): n is a, c, g, or t
  misc_feature (984)..(984): n is a, c, g, or t
  misc_feature (991)..(991): n is a, c, g, or t
  misc_feature (997)..(997): n is a, c, g, or t
  misc_feature (1005)..(1005): n is a, c, g, or t
  misc_feature (1014)..(1014): n is a, c, g, or t
  misc_feature (1022)..(1022): n is a, c, g, or t
  misc_feature (1041)..(1041): n is a, c, g, or t
  misc_feature (1051)..(1051): n is a, c, g, or t
  misc_feature (1069)..(1069): n is a, c, g, or t
  misc_feature (1078)..(1078): n is a, c, g, or t
  misc_feature (1082)..(1082): n is a, c, g, or t
  misc_feature (1091)..(1091): n is a, c, g, or t
  misc_feature (1099)..(1099): n is a, c, g, or t
  misc_feature (1109)..(1109): n is a, c, g, or t
  misc_feature (1124)..(1124): n is a, c, g, or t
  misc_feature (1126)..(1126): n is a, c, g, or t
  misc_feature (1129)..(1129): n is a, c, g, or t
  misc_feature (1134)..(1134): n is a, c, g, or t
nnattagagaaattactatgagaggatcgcatcaccatcaccatcacggatcctatttaggtgacactatagaatcgtcgacccacgcgtccgattgtgttttacaggccgagacagcggctaacaggatatgtaaggttcttgctgtgaatcaagagaatgagaggctgatggaagaatatgagaggctagcgagtgagcttttggaatggattcgtcgcacgatcccctggctggagaaccggactcccgagaagaccatgcaagccatgcagaagaagctggaggacttccgggattaccgccggaagcacaagccacccaaggtgcaggagaaatgccagctggagatcaacttcaacacgctgcagaccaagctgcggatcagcaaccgtcctgccttcatgccctccgagggcaagatggtgtcggatattgctggtgcctggcagaggctggagcaggctgagaagggttacgaggagtggttgctcaatgagattcggagactggagcgcttggaacacctggctgagaagttcaggcagaaggcctcaacgcacgagacttgggcttatggcaaagagcagatcttgctgcagaaggattacgagtcggcgtcgctgacagaggtgcgggctctgctgcggaagcacgaggcgttcgagagcgacctggcagcgcaccaggaccgcgtggagcagatcgcagccatcgcgcaggagctcaatgaactggactatcacgacgctgtgaatgtcaatgatcggtgccagaaaatttgtgaccagtgggaccgactgggaacgcttactcagaagaggagagaagccctagaganaatggagaaattgctagaaaccattgatcagcttcncctggagtttgccaagagggctgctcctttcaanaattggatggaagggcgctatggaggatctgcaanatatgttcnttgtccncagcattgaagaaatccnaaantctgatncctgcncatgaacntttcaaggncccccttncccaagcgaacgaaaacgncattccttcntggccttccaaacgaggnggaaaaggntatncaaacttcnaacttccnaatccgcttnaggcacccgtaaagncnttntcccntgggataaactcccgacca

SEQ ID NO: 196 - DNA, 892 bp, Homo Sapiens
catcaccatcaccatcacggatcctatttaggtgacactatagaatcgtcgacccacgcgtccggtggcaagggtctgaggcgtccccattgtactgtggaggagggtgttcaaaaagaggaaagagagaagtaccgaaagttattggaacgacttaaagaaagtggtcatggaaactctgtctgtcctgtaacttcaaattatcacagttctcaaagaagtcagatggacacattaaagaccaaaggctggggggaagagcaaaatcacggagtcaaaacaactcagtttgttccaaaacaatatagacttgttgaaacaaggggacctctatgttcattgagaagtgaaaagaggtgttcaaaggggaaaattactgatacagagacgatggtcggaatcagatttgaaaatgaaagtaggaggggataccaactggagcctgacctatcagaagaagtgtcggcccgactccgcctgggcagtggaagcaatggcttactcaggaggaaagtgtcaataattgagacaaaggaaaagaattgctcaggcaaagagagggacagaagaacggacgatctccttgaacttacagaggacatggaaaaggaaatcagtaatgccctaggccatggcccacaggatgaaatcctaagtagtgctttcaaattgcgaattactcgaggagatattcagacattaaagaactatcactggctcaatgatgaagtcattaatttttacatgaatcttctggtggaaagaataaaaagcaaggctatccagcacttcatgtattcagtactttcttctatcctaaattaaagtctgggggttaccaagcagtgaaacgatggaccaaaggggtaaatctctttgaacaagaaattat

SEQ ID NO: 197 - DNA, 1845 bp, Homo Sapiens
gtctctgtggttataaagttgggggtggagtggccgggagatgatggctgatgaagaggaagaagtcaagccgatcttgcagaaattgcaggaactcgtggatcagctctactcatttcgagactgctatttcgagacacatagtgttgaggatgctgggaggaagcaacaggatgtgcggaaggagatggagaaaaccctacagcagatggaagaagtagtgggttctgtccagggcaaggcacaagttctaatgctaactgggaaagcactaaatgtgactcctgactatagccctaaggctgaggagcttctgtcaaaggctgtgaagctggagcccgagctggtggaagcctggaaccagctgggtgaggtgtactggaaaaaaggggatgttgcagctgcccacacctgcttctcaggagccctcacccattgcaggaacaaagtctccttgcaaaacctgtcaatggtgcttcgtcagctgcggactgacactgaagatgaacattctcaccatgtcatggacagtgtccgacaggctaagttggctgttcagatggatgtccatgatggccgctcctggtatattcttgggaattcatatctttccctttacttctctactggccagaaccctaagatctcccagcaagccctcagtgcctatgcccaagcagagaaagttgacagaaaagcttctagcaatcctgaccttcatctgaacagggcgacgttgcataaatatgaagagagttatggggaggccctggagggcttctctcgggctgcagccctggaccctgcctggccagagccccggcaacgagagcaacaacttctggaattcctggatagattaaccagcctccttgagagtaagggaaaggtgaagaccaaaaagctgcagagcatgctgggaagcttgcgcccagcccatctaggcccttgcagtgatgggcactatcagtcagcctctgggcagaaagtgaccctggagctcaagccactgagtacgcttcagcctggggtgaacagcggtgccgtcatcctgggaaaggtggtatttagcctcaccacagaggagaaagtcccctttacatttggcctggtagattcagatggaccttgctatgcagtgatggtgtacaatatagtgcagagctggggagtgctcattggagactctgtagccattcctgagcccaacctgcggcttcaccgaattcagcacaaaggaaaggactattccttttccagtgttcgagtggagacgcccctcctgctagtggtgaatgggaagcctcagggatccagcagccaggctgttgccacagtggcatcgcgaccacagtgtgaatgacctttgacttgcatgctcaacagggagtggaggagaggagacaaggctctggacagccggtccagccacatccagtgattcagcagggatgggaggaatgttttaaatgaagactttctctttccctgcctgtattacacttcgtatctcttctctctcctctgtcctcatcatgttccagctctctacagggccacatactcttctggcatatctctcctgtctcttccactgctctctatgttttaagcaaagagcatggaattggtagaagtcttgggatcttgccatgggacagagtccccaaggttcctgttgttgcctccttcctaagcctcatatgtatatatcagttcagtatttattgctaaaggagggggcttaattttgtaatggcttttacttttagcaatttttatttttatttttgaactttaggtccttcctcttctttggggctggaacagaattaaatttgtttg

SEQ ID NO: 198 - DNA, 863 bp, Homo Sapiens
  misc_feature (14)..(14): n is a, c, g, or t
  misc_feature (17)..(17): n is a, c, g, or t
  misc_feature (19)..(19): n is a, c, g, or t
  misc_feature (21)..(21): n is a, c, g, or t
  misc_feature (37)..(37): n is a, c, g, or t
  misc_feature (44)..(44): n is a, c, g, or t
  misc_feature (52)..(53): n is a, c, g, or t
  misc_feature (72)..(72): n is a, c, g, or t
  misc_feature (247)..(247): n is a, c, g, or t
  misc_feature (249)..(250): n is a, c, g, or t
  misc_feature (252)..(252): n is a, c, g, or t
  misc_feature (724)..(724): n is a, c, g, or t
  misc_feature (774)..(774): n is a, c, g, or t
  misc_feature (791)..(791): n is a, c, g, or t
  misc_feature (803)..(803): n is a, c, g, or t
  misc_feature (808)..(808): n is a, c, g, or t
  misc_feature (818)..(818): n is a, c, g, or t
  misc_feature (840)..(840): n is a, c, g, or t
  misc_feature (844)..(844): n is a, c, g, or t
  misc_feature (849)..(849): n is a, c, g, or t
  misc_feature (853)..(853): n is a, c, g, or t
ttatttaagagganatntnantttgagaggatcgcanacctacntacggatnntatttaggtgacactatanaatcgtcgacccacgcgtccgtatttgtaccgaacacaggaaagaagagtgggaaattgaaggcctcctataaacgggattgttttagtgttggcagtaatgttgatatagatttttctggaccaaccatctatggctgggctgtgttggccttcgaagggtggcttgctggctntnntntgagttttgacacagccaaatccaaactgtcacagaataatttcgccctgggttacaaggctgcggacttccagctgcacacacatgtgaacgatggcactgaatttggaggttctatctaccagaaggtgaatgagaagattgaaacatccataaaccttgcttggacagctgggagtaacaacacccgttttggcattgctgctaagtacatgctggattgtagaacttctctctctgctaaagtaaataatgccagcctgattggactgggttatactcagacccttcgaccaggagtcaaattgactttatcagctttaatcgatgggaagaacttcagtgcaggaggtcacaaggttggcttgggatttgaactggaagcttaatgtggtttgaggaaagcatcagatttgtccctggaagtgaagagaaatgaacccactatgttttggccttaaaattcttctgngaaatttcaaaagtgtgaactttttattctttcaaagaattgtaatcctncccacactgaagtctangggttgcgaatnccctnctgagggaangcttgaaggcatgccctggaanttgncatgnttgngccacgtttt

SEQ ID NO: 199 - DNA, 1179 bp, Homo Sapiens
  misc_feature (922)..(922): n is a, c, g, or t
  misc_feature (927)..(927): n is a, c, g, or t
  misc_feature (929)..(929): n is a, c, g, or t
  misc_feature (931)..(931): n is a, c, g, or t
  misc_feature (933)..(933): n is a, c, g, or t
  misc_feature (936)..(936): n is a, c, g, or t
  misc_feature (962)..(962): n is a, c, g, or t
  misc_feature (974)..(974): n is a, c, g, or t
  misc_feature (1006)..(1006): n is a, c, g, or t
  misc_feature (1017)..(1017): n is a, c, g, or t
  misc_feature (1044)..(1044): n is a, c, g, or t
  misc_feature (1057)..(1057): n is a, c, g, or t
  misc_feature (1069)..(1069): n is a, c, g, or t
  misc_feature (1071)..(1071): n is a, c, g, or t
  misc_feature (1079)..(1079): n is a, c, g, or t
  misc_feature (1082)..(1082): n is a, c, g, or t
  misc_feature (1089)..(1089): n is a, c, g, or t
  misc_feature (1100)..(1100): n is a, c, g, or t
  misc_feature (1102)..(1102): n is a, c, g, or t
  misc_feature (1121)..(1121): n is a, c, g, or t
  misc_feature (1125)..(1125): n is a, c, g, or t
  misc_feature (1134)..(1134): n is a, c, g, or t
  misc_feature (1137)..(1137): n is a, c, g, or t
  misc_feature (1148)..(1148): n is a, c, g, or t
  misc_feature (1162)..(1163): n is a, c, g, or t
  misc_feature (1165)..(1165): n is a, c, g, or t
  misc_feature (1173)..(1173): n is a, c, g, or t
  misc_feature (1178)..(1179): n is a, c, g, or t
gaatagagagaattactatgagaggatcgcatcaccatcaccatcacggatcctatttaggtgacactatagaatcgtcgacccacgcgtccggagcaaagctccaaagagaattgttttttccagaatgccaatactggggctcagagctccagctacccactttggattttgaagatgttttaagatatgatgaacacgcatacaagtggctctccaccctcaagaaagtaggcatagtaagactcaccggagcatctgacaaaccaggagaagtttcaaaacttgggaaaaggatgggtttcctctatctcacattttatggacatacttggcaagtgcaagacaaaatcgatgcaaacaatgtggcttacacaactgggaagctaagctttcacactgattatccagccctccatcatccacctggggttcagcttcttcactgcataaagcaaacagtcacagggggtgattcagaaattgtagatgggtttaatgtgtgccaaaaactaaagaaaaataatcctcaggcattccagattttgtcctctacctttgtggactttacagacattggagtggattactgtgatttttctgtacaatcaaaacataaaattatagagttagatgataaaggccaagtggttcgcatcaacttcaataacgcaactagggacacaatatttgatgtgcctgttgaaagagttcagcctttttatgctgctctgaaggagtttgttgacctcatgaacagcaaagaatccaagtttaccttcaagatgaatccaggtgatgtgattacttttgataactggcgcttacttcatggccgacgtagctatgaagcaggaactgagatatcccgccatctagaaggagcttatgctgactgggatgtggtcatgtcaaggcttcntatcntnangncanagggtggagaatggaaactgaagtcncctgtagataanttttaataagattccaatgaccatatttttgngagatatggcncattattcccagaccatggatcttggngattacatataanttccttaacaangnacatgtanctnctccccnaaaaaaacccntnactttggaaaccaaaacanggcnactttttanagntttccccctcntttgcaaaaaagcnncnttccgccnggggnn

SEQ ID NO: 200 - DNA, 816 bp, Homo Sapiens
  misc_feature (7)..(7): n is a, c, g, or t
  misc_feature (13)..(13): n is a, c, g, or t
  misc_feature (690)..(690): n is a, c, g, or t
  misc_feature (723)..(723): n is a, c, g, or t
  misc_feature (732)..(732): n is a, c, g, or t
  misc_feature (739)..(739): n is a, c, g, or t
  misc_feature (760)..(760): n is a, c, g, or t
  misc_feature (792)..(793): n is a, c, g, or t
  misc_feature (796)..(796): n is a, c, g, or t
  misc_feature (800)..(800): n is a, c, g, or t
  misc_feature (805)..(805): n is a, c, g, or t
  misc_feature (807)..(807): n is a, c, g, or t
  misc_feature (815)..(815): n is a, c, g, or t
tcttaangagganaattaactatgagaggatcgcatcaccatcaccatcacggatcctatttaggtgacactatagaatcgtcgacccacgcgtccggaaaaagatgtcccaatgctgccccaaagccagagaagaaagatggggtgtccttctgtgctgaacatgtccgtaggaatgccctggcacttcatgctcaaatgaagaagaccaacccagggcctgtgggtgaaacactcctgtgccagctgagctcatatgctaagacagagctggggtctcagactccagaaagtagtcgcagtgaagccagccgaatactagatgaagacagctggagtgatggggagcaggaacccattactgtggatcagacatggagaggtgaccctgacagtgaagctgatagcatagacagtgatcaagaagatcccctaaaacatgctggtgtctacacagcagaagaagtggccctgattatgcgtgaaaagctaattcgtttgcagtcgttgtatattgatcagtttaaacgacttcagcatctgctcaaggagaagaagcgccgatacttacataatcgcaaagtggaacatgaagctctaggcagtagtctcctgactggcccagaagggacttttggccaaagaacgagagaacttaaagcgattaaaatgtctgcgacgataccgccngcgctatggagtggaagccttactgcataggcngttgaaggnaacgganaatgctggccacagatggtgnttgcccaacaggcccataccactcgttccagnncanaggngcttngnccttttgng

SEQ ID NO: 201 - DNA, 1238 bp, Homo Sapiens
  misc_feature (2)..(2): n is a, c, g, or t
  misc_feature (4)..(4): n is a, c, g, or t
  misc_feature (855)..(855): n is a, c, g, or t
  misc_feature (892)..(892): n is a, c, g, or t
  misc_feature (906)..(906): n is a, c, g, or t
  misc_feature (931)..(931): n is a, c, g, or t
  misc_feature (942)..(942): n is a, c, g, or t
  misc_feature (962)..(962): n is a, c, g, or t
  misc_feature (968)..(969): n is a, c, g, or t
  misc_feature (974)..(974): n is a, c, g, or t
  misc_feature (983)..(983): n is a, c, g, or t
  misc_feature (996)..(996): n is a, c, g, or t
  misc_feature (998)..(998): n is a, c, g, or t
  misc_feature (1007)..(1007): n is a, c, g, or t
  misc_feature (1009)..(1009): n is a, c, g, or t
  misc_feature (1038)..(1038): n is a, c, g, or t
  misc_feature (1051)..(1051): n is a, c, g, or t
  misc_feature (1055)..(1055): n is a, c, g, or t
  misc_feature (1062)..(1062): n is a, c, g, or t
  misc_feature (1084)..(1084): n is a, c, g, or t
  misc_feature (1103)..(1103): n is a, c, g, or t
  misc_feature (1119)..(1119): n is a, c, g, or t
  misc_feature (1123)..(1123): n is a, c, g, or t
  misc_feature (1148)..(1148): n is a, c, g, or t
  misc_feature (1155)..(1155): n is a, c, g, or t
  misc_feature (1158)..(1158): n is a, c, g, or t
  misc_feature (1181)..(1181): n is a, c, g, or t
  misc_feature (1185)..(1185): n is a, c, g, or t
  misc_feature (1191)..(1191): n is a, c, g, or t
  misc_feature (1194)..(1194): n is a, c, g, or t
  misc_feature (1197)..(1197): n is a, c, g, or t
  misc_feature (1204)..(1205): n is a, c, g, or t
  misc_feature (1207)..(1207): n is a, c, g, or t
  misc_feature (1210)..(1211): n is a, c, g, or t
  misc_feature (1225)..(1225): n is a, c, g, or t
  misc_feature (1231)..(1232): n is a, c, g, or t
  misc_feature (1238)..(1238): n is a, c, g, or t
cnanagagaaattactatgagaggatcgcatcaccatcaccatcacggatcctatttaggtgacactatagaatcgtcgacccacgcgtccgacactaagcagttgagatttgaagatgtagtaaaccagtcaagtccaaaaaattgtactgtgtactgtggaggaattgcgtctgggttaacagatcagcttatgagacagacattctcaccatttggacaaattatggaaataagagttttcccagaaaagggctattcatttgtcagattttcaacccatgaaagtgcagcccatgccattgtttcggtgaacggtactacgattgaaggacatgtggttaaatgctattggggtaaagaatctcctgatatgactaaaaacttccaacaggtaattcgatttttcatagcattctttaaggtttccatcttacatgtcacataaaagctttggaaactctgtaaaatgaacaataaaataaagcatatagctactttcagttgattgtatttcaaaattgattatttgcggtattaactgaatcttaatactttcttttcacaggtgtcaccaccccaataaacttagacaatgataaataacagagtcctattcacataagggtgcttacttagtttttctcttccttgtctcccactctttcttcatatacggtgtttcttatgtgttccctaaaacaatactttgctttttcctaggttgactatagtcaatggggccaatggagccaagtgtatggaaacccacaacagtatggacagtatatggcaaatgggtggcaagtaccgccttatgggagtatacgggccaaccatggaaatcaacaaggnatttggagtagatcaatcaccttcctgctgcttgganggggtggaattggngctcagccccccccaaggacaagcncctccccctgnaatacctcctcctaacccanccgganntgggnatggcaagntacccaacccagngngccgggacncnaaaaaaaaaattggaattccaggaaaggncttccaatttccngggnacccccngaaaaacctgaaaggtaaaccncggaaaatggaaaaatttntttttaaaattgaaangttnggaaccttttacccaaatttgcttnggggaanaancgggcccccaattccgccctttnaaanttttgntcnggngggaaannancannattttcttttggcnaaaacnnaaaaan

SEQ ID NO: 202 - DNA, 1126 bp, Homo Sapiens
  misc_feature (1)..(1): n is a, c, g, or t
  misc_feature (8)..(8): n is a, c, g, or t
  misc_feature (688)..(688): n is a, c, g, or t
  misc_feature (804)..(804): n is a, c, g, or t
  misc_feature (853)..(853): n is a, c, g, or t
  misc_feature (863)..(863): n is a, c, g, or t
  misc_feature (865)..(865): n is a, c, g, or t
  misc_feature (874)..(874): n is a, c, g, or t
  misc_feature (891)..(891): n is a, c, g, or t
  misc_feature (897)..(897): n is a, c, g, or t
  misc_feature (907)..(907): n is a, c, g, or t
  misc_feature (909)..(909): n is a, c, g, or t
  misc_feature (915)..(915): n is a, c, g, or t
  misc_feature (921)..(921): n is a, c, g, or t
  misc_feature (924)..(925): n is a, c, g, or t
  misc_feature (938)..(938): n is a, c, g, or t
  misc_feature (948)..(948): n is a, c, g, or t
  misc_feature (951)..(951): n is a, c, g, or t
  misc_feature (961)..(961): n is a, c, g, or t
  misc_feature (966)..(966): n is a, c, g, or t
  misc_feature (977)..(977): n is a, c, g, or t
  misc_feature (982)..(982): n is a, c, g, or t
  misc_feature (988)..(988): n is a, c, g, or t
  misc_feature (992)..(992): n is a, c, g, or t
  misc_feature (996)..(996): n is a, c, g, or t
  misc_feature (1008)..(1008): n is a, c, g, or t
  misc_feature (1027)..(1028): n is a, c, g, or t
  misc_feature (1032)..(1032): n is a, c, g, or t
  misc_feature (1035)..(1035): n is a, c, g, or t
  misc_feature (1038)..(1038): n is a, c, g, or t
  misc_feature (1041)..(1041): n is a, c, g, or t
  misc_feature (1054)..(1054): n is a, c, g, or t
  misc_feature (1056)..(1056): n is a, c, g, or t
  misc_feature (1061)..(1061): n is a, c, g, or t
  misc_feature (1063)..(1063): n is a, c, g, or t
  misc_feature (1071)..(1071): n is a, c, g, or t
  misc_feature (1082)..(1082): n is a, c, g, or t
  misc_feature (1085)..(1086): n is a, c, g, or t
  misc_feature (1094)..(1094): n is a, c, g, or t
  misc_feature (1101)..(1101): n is a, c, g, or t
  misc_feature (1107)..(1109): n is a, c, g, or t
  misc_feature (1114)..(1114): n is a, c, g, or t
  misc_feature (1116)..(1116): n is a, c, g, or t
  misc_feature (1119)..(1119): n is a, c, g, or t
ntagaganattaactatgagaggatcgcatcaccatcaccatcacggatcctatttaggtgacactatagaatcgtcgacccacgcgtccgcccacgcgtccgcccacgcgtccgccaatctgctggtcatagcagccatcgcctccaaccgccgcttccaccagcccatctactacctgctcggcaatctggccgcggctgacctcttcgcgggcgtggcctacctcttcctcatgttccacactggtccccgcacagcccgactttcacttgagggctggttcctgcggcagggcttgctggacacaagcctcactgcgtcggtggccacactgctggccatcgccgtggagcggcaccgcagtgtgatggccgtgcagctgcacagccgcctgccccgtggccgcgtggtcatgctcattgtgggcgtgtgggtggctgccctgggcctggggctgctgcctgcccactcctggcactgcctctgtgccctggaccgctgctcacgcatggcacccctgctcagccgctcctatttggccgtctgggctctgtcgagcctgcttgtcttcctgctcatggtggctgtgtacacccgcattttcttctacgtgcggcggcgagtgcagcgcatggcaaagcatgtcagctgccacccccgctaccgagagaccacgctcagcctgntcaagactgttgtcatcatcctgggggcgttcgtggtctgctggacaccaggccaggtggtactgctcctggatggtttaggctgtgagtcctgcaatgtcctggctgtaaaaaantacttcctactgttggccgaggccaactcactggtcaatgctgctgtgnactcttgccnanatgctgaanatgcgccgaacctttcngccgcntttctttgcngngcgtgnctccgncanntcaacccgcgaantttgtccaantanaaaatccttntgccnagggaaagtgnccagnactcgnaatnatgnttcccgaaaaanggccacccaactgaagaannccanccnttnaanaaacttgaaattnanggggnancggaaaanaaaaaaaaccnaannccctgaanaaattgngggggnnnctggntnaanccaacca

SEQ ID NO: 203 - DNA, 1365 bp, Homo Sapiens
tatgagaggtcgcatcaccatcaccatcacggtcgacccacgcgtccgggcggctccggcgcagaccttggagagcacagctgccggcccgcgagccagcctcggttcccgcggcccgccgaggctcggagccatccagcgacccggcgaccggcctcaggccccgccatggggaagaccaacagcaagctggcccccgaggtgctggaggaccttgttcagaacactgagttcagcgagcaggagctgaagcagtggtacaagggcttcctgaaggactgccccagtggcatcctcaacctggaggagtttcagcagctctacatcaagttcttcccctacggcgacgcctccaagttcgcgcagcacgctttccgcaccttcgacaagaacggcgacggcaccatcgacttccgggagttcatctgcgccctgtcggtcacctcccgcggcagcttcgagcagaagctcaactgggcctttgagatgtacgacctggacggcgacgggcgaatcacgcgcctggagatgctggagatcatcgaggcaatctacaagatggtgggcaccgtgatcatgatgcgcatgaaccaggacgggctcacgccccagcagcgtgtggacaagatcttcaagaagatggaccaggataaggacgaccagattacattggaggagttcaaggaggcagccaagagtgacccatccattgtgttgctgctgcagtgtgacatgcagaagtagaagctggtgaggggcagggtccctggccagaaggggcatggccacctcccaacctgatgacctctctggctggcctccaggaggagggacactccagccccctctctggcccacccgtcctctgcccaagcccttctcccctccataaaaatctttgaggaccacctcaccctgcaaaaagaccggtcctcaaaaccctgactctaacccacctcccctttggcaaaacaagtgccattggcatagcgcactccccttcctccaacccccgctccaccacatgtcacgctccccccctcaaacaccccctcactaacaaaccctccacttttctaccaatcccactaccaacaataccctaatatccacactactccacacctcctcccactactcttcccctccccctaaccctccatataccctacaccccatcacatcatcctctcaccaccgccccacccctacaactccccgtacacccacactacccccacgtaacacatcctcccactaaatctcacacgcacttcctcatattcactaccccactccctttactaacctccacccccgttcccatacttttcctcactaccaactccttaaccttcatactat

SEQ ID NO: 204 - DNA, 759 bp, Homo Sapiens
  misc_feature (3)..(3): n is a, c, g, or t
  misc_feature (7)..(7): n is a, c, g, or t
  misc_feature (17)..(17): n is a, c, g, or t
  misc_feature (22)..(22): n is a, c, g, or t
  misc_feature (25)..(25): n is a, c, g, or t
  misc_feature (67)..(67): n is a, c, g, or t
  misc_feature (81)..(81): n is a, c, g, or t
  misc_feature (91)..(91): n is a, c, g, or t
  misc_feature (116)..(116): n is a, c, g, or t
  misc_feature (184)..(184): n is a, c, g, or t
  misc_feature (229)..(229): n is a, c, g, or t
  misc_feature (245)..(245): n is a, c, g, or t
  misc_feature (282)..(282): n is a, c, g, or t
  misc_feature (294)..(294): n is a, c, g, or t
  misc_feature (337)..(337): n is a, c, g, or t
  misc_feature (343)..(343): n is a, c, g, or t
  misc_feature (364)..(364): n is a, c, g, or t
  misc_feature (371)..(371): n is a, c, g, or t
  misc_feature (391)..(391): n is a, c, g, or t
  misc_feature (396)..(396): n is a, c, g, or t
  misc_feature (415)..(416): n is a, c, g, or t
  misc_feature (419)..(419): n is a, c, g, or t
  misc_feature (423)..(424): n is a, c, g, or t
  misc_feature (427)..(427): n is a, c, g, or t
  misc_feature (429)..(429): n is a, c, g, or t
  misc_feature (450)..(450): n is a, c, g, or t
  misc_feature (455)..(455): n is a, c, g, or t
  misc_feature (485)..(485): n is a, c, g, or t
  misc_feature (506)..(508): n is a, c, g, or t
  misc_feature (514)..(514): n is a, c, g, or t
  misc_feature (516)..(516): n is a, c, g, or t
  misc_feature (532)..(532): n is a, c, g, or t
  misc_feature (543)..(543): n is a, c, g, or t
  misc_feature (550)..(550): n is a, c, g, or t
  misc_feature (563)..(563): n is a, c, g, or t
  misc_feature (584)..(584): n is a, c, g, or t
  misc_feature (586)..(586): n is a, c, g, or t
  misc_feature (589)..(589): n is a, c, g, or t
  misc_feature (593)..(593): n is a, c, g, or t
  misc_feature (604)..(604): n is a, c, g, or t
  misc_feature (614)..(614): n is a, c, g, or t
  misc_feature (621)..(622): n is a, c, g, or t
  misc_feature (633)..(634): n is a, c, g, or t
  misc_feature (640)..(640): n is a, c, g, or t
  misc_feature (658)..(659): n is a, c, g, or t
  misc_feature (661)..(661): n is a, c, g, or t
  misc_feature (668)..(668): n is a, c, g, or t
  misc_feature (678)..(678): n is a, c, g, or t
  misc_feature (682)..(682): n is a, c, g, or t
  misc_feature (695)..(695): n is a, c, g, or t
  misc_feature (699)..(699): n is a, c, g, or t
  misc_feature (701)..(701): n is a, c, g, or t
  misc_feature (707)..(707): n is a, c, g, or t
  misc_feature (726)..(726): n is a, c, g, or t
  misc_feature (731)..(731): n is a, c, g, or t
  misc_feature (745)..(745): n is a, c, g, or t
  misc_feature (750)..(750): n is a, c, g, or t
aanaaantagagaaaanttacntangagaggatcgcatcaccatcaccatcacggtatcctatttangatgacacttattnttaatcgtcnacccacgtcgtccgggcggcgtccncggtttcgcaggtctttcgctgagcgtctctgcttagccgcggtcatgagccggcacagtccggctgnagaggcaggttctgagcctgtaccgcgatctgctgcgcgccgggngtgggaagccgggcgncgaggcgcgagtgcgggcagagttccggcagcatgcnggcctgccgcgntccgacgtgctgcgcatcgagtacctgtaccgccgcgggcggngccagntgcagctgctacgctcgggcnacgccancgccatgggcgccttcgtangcccncgggccccgaccggggagnntgncggnntgngntcccagcctgacgacggctanagtcnaaggaacccccacaacagttacgggggcancggagacccggcccgactgannnagacangnaaatagccaaaactcnctcgatggcanggtgganccaggaagctcgnctgactgcatggggggactgngnaanccancctaaggtganagatcttaanaaactannttgacgaattnnggatgncatagactcctccttggnnangcaaggngcctacagancccnttgatggactgcnaggnangccccncctttttcgatgcttgganactgntctgtgctcctccnccatnatggcttag

SEQ ID NO: 205 - DNA, 1214 bp, Homo Sapiens
  misc_feature (869)..(869): n is a, c, g, or t
  misc_feature (919)..(919): n is a, c, g, or t
  misc_feature (940)..(941): n is a, c, g, or t
  misc_feature (965)..(965): n is a, c, g, or t
  misc_feature (968)..(968): n is a, c, g, or t
  misc_feature (979)..(979): n is a, c, g, or t
  misc_feature (995)..(995): n is a, c, g, or t
  misc_feature (1000)..(1000): n is a, c, g, or t
  misc_feature (1009)..(1009): n is a, c, g, or t
  misc_feature (1018)..(1018): n is a, c, g, or t
  misc_feature (1022)..(1022): n is a, c, g, or t
  misc_feature (1033)..(1033): n is a, c, g, or t
  misc_feature (1045)..(1045): n is a, c, g, or t
  misc_feature (1049)..(1050): n is a, c, g, or t
  misc_feature (1064)..(1064): n is a, c, g, or t
  misc_feature (1067)..(1067): n is a, c, g, or t
  misc_feature (1069)..(1069): n is a, c, g, or t
  misc_feature (1075)..(1075): n is a, c, g, or t
  misc_feature (1077)..(1077): n is a, c, g, or t
  misc_feature (1099)..(1099): n is a, c, g, or t
  misc_feature (1101)..(1101): n is a, c, g, or t
  misc_feature (1104)..(1104): n is a, c, g, or t
  misc_feature (1127)..(1127): n is a, c, g, or t
  misc_feature (1130)..(1130): n is a, c, g, or t
  misc_feature (1134)..(1134): n is a, c, g, or t
  misc_feature (1142)..(1142): n is a, c, g, or t
  misc_feature (1145)..(1145): n is a, c, g, or t
  misc_feature (1163)..(1164): n is a, c, g, or t
  misc_feature (1166)..(1166): n is a, c, g, or t
  misc_feature (1168)..(1168): n is a, c, g, or t
  misc_feature (1190)..(1190): n is a, c, g, or t
  misc_feature (1192)..(1192): n is a, c, g, or t
  misc_feature (1194)..(1194): n is a, c, g, or t
  misc_feature (1201)..(1204): n is a, c, g, or t
caatagagaaattactatgagaggatcgcatcaccatcaccatcacggatcctatttaggtgacactatagaatcgtcgacccacgcgtccggcccacgccatgcggcgggcattccgaggccccaagaatgggaggtttgctctggtggaccagcgtgtggccgaatatgtcagatacatgcaggccaaaggggaccccatcacccgggaggcgatgcagctgaaagctctcgaaatcgcccaggaaatgaacattccagagaaagggttcaaggcaagcttgggttggtgtcgaagaatgatgagaaggtatgacctgtctctgaggcataaagtgcccgtgccccagcacctgccggaagacctgactgagaaactcgtcacttaccagcgcagtgtcctggctctgcgcagggcgcatgactatgaggtagctcagatggggaatgcagatgagacgcccatttgtttagaggtgccatcacgggtaactgttgataaccagggcgaaaagcctgtcttggtcaagacaccaggcagggaaaaactgaaaatcacagcaatgcttggtgtcttggctgatgggaggaagttaccaccgtacatcattttgaggggaacatatatccccccggggaagtttcccagtgggatggaaattcgctgccaccggtatgggtggatgactgaagacttgatgcaggactggttggaagtggtgtggagacggaggacaggagcagtgcccaagcagcgagggatgctgatcttgaatggcttccggggccatgccacagattccgtgaagaactccatggaaagcatgaacactgacatggtgatcatcccagggggtctgacctcacancttcaggtgctggatgtcgtggtctacaagccactgaatgacagtgtgcngggcccagtactccaactggnnttctggcttggaaacctggcgctnaancccaacccggnaatgcttaaaaacccnccccntgggccctncttttttgnaatngggtcatggtnccccgtggaaanaacnnttccaagtgaattnctncntccaangntttcaaaaaattgccctttttncnccnacctttgaaagaagaaaaaaaanttncctntggaaaanccnaagtgaatttccccggannananaaaaccccccaaaaaattttgncncncaaaccnnnnttaaaaccat

SEQ ID NO: 206 - DNA, 941 bp, Homo Sapiens
  misc_feature (6)..(6): n is a, c, g, or t
  misc_feature (19)..(19): n is a, c, g, or t
  misc_feature (373)..(373): n is a, c, g, or t
  misc_feature (549)..(549): n is a, c, g, or t
  misc_feature (650)..(650): n is a, c, g, or t
  misc_feature (705)..(705): n is a, c, g, or t
  misc_feature (721)..(721): n is a, c, g, or t
  misc_feature (725)..(725): n is a, c, g, or t
  misc_feature (749)..(749): n is a, c, g, or t
  misc_feature (762)..(762): n is a, c, g, or t
  misc_feature (778)..(778): n is a, c, g, or t
  misc_feature (797)..(797): n is a, c, g, or t
  misc_feature (815)..(815): n is a, c, g, or t
  misc_feature (825)..(825): n is a, c, g, or t
  misc_feature (833)..(833): n is a, c, g, or t
  misc_feature (838)..(838): n is a, c, g, or t
  misc_feature (844)..(844): n is a, c, g, or t
  misc_feature (851)..(851): n is a, c, g, or t
  misc_feature (854)..(854): n is a, c, g, or t
  misc_feature (856)..(856): n is a, c, g, or t
  misc_feature (865)..(866): n is a, c, g, or t
  misc_feature (872)..(873): n is a, c, g, or t
  misc_feature (883)..(883): n is a, c, g, or t
  misc_feature (892)..(892): n is a, c, g, or t
  misc_feature (894)..(894): n is a, c, g, or t
  misc_feature (908)..(908): n is a, c, g, or t
  misc_feature (911)..(911): n is a, c, g, or t
  misc_feature (918)..(918): n is a, c, g, or t
  misc_feature (929)..(931): n is a, c, g, or t
  misc_feature (934)..(934): n is a, c, g, or t
  misc_feature (939)..(939): n is a, c, g, or t
aaaaanaaaagagaaaatnactatgagaggatcgcatcaccatcaccatcacggtatcctatttaggtgacactatagaatcgtcgacccacgcgtccggcgctgtcatgatgttcgttggcttcctgggctgctacggggccatccaggaatcccagtgcctgctggggacgttcttcacctgcctggtcatcctgtttgcctgtgaggtggccgccggcatctggggctttgtcaacaaggaccagatcgccaaggatgtgaagcagttctatgaccaggccctacagcaggccgtggtggatgatgacgccaacaacgccaaggctgtggtgaagaccttccacgagacgcttgactgctgtggctccancacactgactgctttgaccacctcagtgctcaagaacaatttgtgtccctcgggcagcaacatcatcagcaacctcttcaaggaggactgccaccagaagatcgatgacctcttctccgggaagctgtacctcatcggcattgctgccatcgtggtcgctgtgatcatgatcttcnagatgatcctgagcatggtgctgtgctgtggcatccggaacagctccgtgtactgaggccccgcagctctggccacagggacctctgcagtgccccctaantgacccggacacttccgagggggccatcaccgcctgtgtatataacgtttccggnattactctgctacacngtanccttttttacttttgggggttttngtttttgttcctnaaacctttcctgttancctttttcagggcttgaanttcacatgtaggttggcnttgtatgaantggaagancggcncttggntctttgnggnanttggaaggnnaagggnntcctttctgnccctggggntncccaagggtgcctntgncttgctnaaaccaagacnnntcnttggnaa

SEQ ID NO: 207 - DNA, 1160 bp, Homo Sapiens
  misc_feature (899)..(899): n is a, c, g, or t
  misc_feature (951)..(951): n is a, c, g, or t
  misc_feature (959)..(959): n is a, c, g, or t
  misc_feature (961)..(961): n is a, c, g, or t
  misc_feature (964)..(964): n is a, c, g, or t
  misc_feature (1001)..(1001): n is a, c, g, or t
  misc_feature (1004)..(1004): n is a, c, g, or t
  misc_feature (1008)..(1008): n is a, c, g, or t
  misc_feature (1026)..(1026): n is a, c, g, or t
  misc_feature (1048)..(1048): n is a, c, g, or t
  misc_feature (1056)..(1056): n is a, c, g, or t
  misc_feature (1059)..(1060): n is a, c, g, or t
  misc_feature (1066)..(1066): n is a, c, g, or t
  misc_feature (1071)..(1071): n is a, c, g, or t
  misc_feature (1076)..(1076): n is a, c, g, or t
  misc_feature (1111)..(1112): n is a, c, g, or t
  misc_feature (1117)..(1117): n is a, c, g, or t
  misc_feature (1120)..(1120): n is a, c, g, or t
  misc_feature (1125)..(1125): n is a, c, g, or t
  misc_feature (1138)..(1138): n is a, c, g, or t
  misc_feature (1142)..(1142): n is a, c, g, or t
  misc_feature (1147)..(1148): n is a, c, g, or t
  misc_feature (1157)..(1160): n is a, c, g, or t
gagaaattactatgagaggatcgcatcaccatcaccatcacggatcctatttaggtgacactatagaatcgtcgacccacgcgtccgggagggggtcgcgcgaagtgccagatgcaggcggggaagcccatcctctattcctatttccgaagctcctgctcatggagagttcgaattgctctggccttgaaaggcatcgactacgagacggtgcccatcaatctcataaaggatgggggccaacagttttctaaggacttccaggcactgaatcctatgaagcaggtgccaaccctgaagattgatggaatcaccattcaccagtcactggccatcattgagtatctagaggagacgcgtcccactccgcgacttctgcctcaggacccaaagaagagggccagcgtgcgtatgatttctgacctcatcgctggtggcatccagcccctgcagaacctgtctgtcctgaagcaagtgggagaggagatgcagctgacctgggcccagaacgccatcacttgtggctttaacgccctggagcagatcctacagagcacagcgggcatatactgtgtaggagacgaggtgaccatggctgatctgtgcttggtgcctcaggtggcaaatgctgaaagattcaaggtggatctcaccccctaccctaccatcagctccatcaacaagaggctgctggtcttggaggccttccaggtgtctcacccctgccggcagccagatacacccactgagctgagggcctagctcccaaatcctgccccgttggcacagggccacaggagcagaagctgggtgggctgaagaggcctggaaacgagagtcttaattgaggagatgggagactcgaactctagccctggatctgccttcctgctgaactngttccacctcagtcccctcatctgtcacacgcatgtagggtggaataagganatgcgggnancanggtgggcaggaatactgttatctatgtgacggggcantcntgangctgaaatgaaaatgcgnattaaaatgcctggcgtgctcnccgtaacnccnngggaangctgngtgcnttttccctccccttttgtggggggactccaaaaannccccnctnaattngggggaattaacngaanccccnnaaaaaaaannnn

SEQ ID NO: 208 - DNA, 1094 bp, Homo Sapiens
  misc_feature (888)..(888): n is a, c, g, or t
  misc_feature (919)..(919): n is a, c, g, or t
  misc_feature (922)..(922): n is a, c, g, or t
  misc_feature (941)..(941): n is a, c, g, or t
  misc_feature (945)..(945): n is a, c, g, or t
  misc_feature (951)..(951): n is a, c, g, or t
  misc_feature (976)..(976): n is a, c, g, or t
  misc_feature (991)..(991): n is a, c, g, or t
  misc_feature (1001)..(1001): n is a, c, g, or t
  misc_feature (1004)..(1004): n is a, c, g, or t
  misc_feature (1028)..(1028): n is a, c, g, or t
  misc_feature (1036)..(1036): n is a, c, g, or t
  misc_feature (1051)..(1053): n is a, c, g, or t
  misc_feature (1055)..(1055): n is a, c, g, or t
  misc_feature (1057)..(1057): n is a, c, g, or t
  misc_feature (1062)..(1062): n is a, c, g, or t
  misc_feature (1072)..(1072): n is a, c, g, or t
  misc_feature (1074)..(1074): n is a, c, g, or t
  misc_feature (1084)..(1084): n is a, c, g, or t
  misc_feature (1086)..(1087): n is a, c, g, or t
  misc_feature (1089)..(1089): n is a, c, g, or t
tagagaaaattactatgagaggatcgcatcaccatcaccatcacggatcctatttaggtgacactatagaatcgtcgacccacgcgtccgggaagcagagaaagttaaaggagcccttgccaaatggaaagaaaaaaagcaccaaattagagagtctgagtgacctggagagagctttaactgaaagcaaggagactgcttcagctatggcaactcttggggaagctcgcctaagggaaatggaagccttgcagtctctcagactcgccaatgaagggaaattgctgtcgcctctccaagatgtggatataaaaatctgcctatgtcagaaggccccagctgcccctatgattcaatgtgaactctgcagggatgctttccacaccagttgtgtggcggtacccagtatttcacagggcctgcgaatctggctttgtccccattgtcggaggtcagagaaacctccattagagaaaattctgcccctgctcgcctcccttcagcgtatccgagttcgccttcctgagggagatgcacttcgatatatgattgaaagaaccgtgaactggcagcacagagcccagcaactgctttcgtcagggaatcttaaatttgtgcaagatcgagtgggctcaggactgttatatagcagatggcaagcctcagcaggacaggtgtcagacacaaacaaggtatctcaacctcctggcacaacatcattttctttgcctgatgactgggacaacagaacctcatatttgcactcccccttctcaactggacgaagttgtatccccctccatggtgttagtccagaagtgaatgaactattgatggaagcccagctgctccaggtatcccttcctgaaattcaggaacttttaccanacttttacttgcaaagccaagccctgctcancanactgaccgaagctcaccantganacccancatgaaaaaaatgactgttgcccanggaaaccaaaatggnattaacagtnctngaaaaaaaaactgaaaaaaccccntggaaaanaaagggccctctccnnntnancgggngggaaccaantnaaaaaaatgncnnanccccc

SEQ ID NO: 209 - DNA, 863 bp, Homo Sapiens
  misc_feature (2)..(2): n is a, c, g, or t
  misc_feature (622)..(622): n is a, c, g, or t
  misc_feature (626)..(626): n is a, c, g, or t
  misc_feature (638)..(638): n is a, c, g, or t
  misc_feature (643)..(643): n is a, c, g, or t
  misc_feature (649)..(649): n is a, c, g, or t
  misc_feature (651)..(651): n is a, c, g, or t
  misc_feature (656)..(657): n is a, c, g, or t
  misc_feature (665)..(665): n is a, c, g, or t
  misc_feature (668)..(668): n is a, c, g, or t
  misc_feature (674)..(674): n is a, c, g, or t
  misc_feature (681)..(681): n is a, c, g, or t
  misc_feature (689)..(689): n is a, c, g, or t
  misc_feature (729)..(729): n is a, c, g, or t
  misc_feature (735)..(735): n is a, c, g, or t
  misc_feature (739)..(740): n is a, c, g, or t
  misc_feature (745)..(745): n is a, c, g, or t
  misc_feature (749)..(750): n is a, c, g, or t
  misc_feature (762)..(762): n is a, c, g, or t
  misc_feature (767)..(767): n is a, c, g, or t
  misc_feature (779)..(779): n is a, c, g, or t
  misc_feature (786)..(786): n is a, c, g, or t
  misc_feature (800)..(800): n is a, c, g, or t
  misc_feature (805)..(805): n is a, c, g, or t
  misc_feature (808)..(808): n is a, c, g, or t
  misc_feature (811)..(811): n is a, c, g, or t
  misc_feature (837)..(838): n is a, c, g, or t
  misc_feature (843)..(843): n is a, c, g, or t
  misc_feature (851)..(851): n is a, c, g, or t
tnagaggagaattaactatgagaggatcgcatcaccatcaccatcacggatcctatttaggtgacactatagaatcgtcgacccacgcgtccgtgggaatcatggcagcatccaggccattgtcccgcttctgggagtggggaaagaacatcgtctgcgtggggaggaactacgcggaccacgtcagggagatgcgcagcgcggtgttgagcgagcccgtgctgttcctgaagccgtccacggcctacgcgcccgagggctcgcccatcctcatgcccgcgtacactcgcaacctgcaccacgagctggagctgggcgtggtgatgggcaagcgctgccgcgcagtccccgaggctgcggccatggactacgtgggcggctatgccctgtgcctggatatgaccgcccgggacgtgcaggacgagtgcaagaagaaggggctgccctggactctggcgaagagcttcacggcgtcctgcccggtcagcgcgttcgtgcccaaggagaagatccctgaccctcacaagctgaagctctggctcaaggtcaacggcgaactcagacaggagggtgagacatcctccatgattttttccatcccctacatcatcagctatgtttntaanatcataaccttnggaanaaggananatttnncttgactnggnaccccnaaggganttgggacnggttaaaaaaaacggttgagaagcggagggtggcataaancggggntggnncagtntgannttttaaaggggnaaaanccccaaaaattnggggttntttctttaaaacangtttnccnaangaagaaggggggcccaagaaaaaaanncaagnccaccggntttatttaaagg

SEQ ID NO: 210 - DNA, 953 bp, Homo Sapiens
  misc_feature (3)..(3): n is a, c, g, or t
  misc_feature (8)..(9): n is a, c, g, or t
  misc_feature (846)..(846): n is a, c, g, or t
  misc_feature (868)..(868): n is a, c, g, or t
  misc_feature (908)..(908): n is a, c, g, or t
  misc_feature (924)..(924): n is a, c, g, or t
  misc_feature (929)..(929): n is a, c, g, or t
  misc_feature (948)..(949): n is a, c, g, or t
atnagagnnaattactatgagaggatcgcatcaccatcaccatcacggatcctatttaggtgacactatagaatcgtcgacccacgcgtccggaaagaagaagttactccgaaaatgtgagaataagcatattgccaattatatctctgggatccagactatcggacatagggtaattgtatctgatgtccaagaaagtttcatctgggttcgctacaagcgtaatgaaaaccagcttatcatctttgctgatgatacctacccccgatgggtcactacagccagcctcctggactatgacactgtggctggggcagacaagtttggcaacatatgtgtggtgaggctcccacctaacaccaatgatgaagtagatgaggatcctacaggaaacaaagccctgtgggaccgtggcttgctcaatggggcctcccagaaggcagaggtgatcatgaactaccatgtcggggagacggtgctgtccttgcagaagaccacgctgatccctggaggctcagaatcacttgtctataccaccttgtctggaggaattggcatccttgtgccattcacgtcccatgaggaccatgacttcttccagcatgtggaaatgcacctgcggtctgaacatccccctctctgtgggcgggaccacctcagctttcgctcctactacttccctgtgaagaatgtgattgatggagacctctgtgagcagttcaattccatggaacccaacaaacaaaagaacgtctctgaagaactggaccgaaccccacccgaagtgtccaagaaactcgaggatatccggacccgctacgccttctgagccctcctttcccgggngggggcttgccagagactgtgntgtttttgttttccccccaccaccatcactgccacctggntttctgccatgggggnaggangggtgactggataattaannactg

SEQ ID NO: 211 - DNA, 1016 bp, Homo Sapiens
tatgagaggatcgcatcaccatcaccatcacggatcctatttaggtgacactatagaatcgtcgacccacgcgtccgcccacgcgtccgatttctcgaaaggcaccctgaagattgctaacaagcagttcacagctgttaaaaatgactacgagatgaccttcaataacgagacttccgtcatgccctgtgaggacgaccatcatttacctacggttcagtttgatttcacggggattgatgacctcgagaacaagtcgaaagactcacttgtagacatcatcgggatctgcaagagctatgaagacgccactaaaatcacagtgaggtctaacaacagagaagttgccaagaggaatatctacttgatggacacatccgggaaggtggtgactgctacactgtggggggaagatgctgataaatttgatggttctagacagcccgtgttggctatcaaaggagcccgagtctctgatttcggtggacggagcctctccgtgctgtcttcaagcactatcattgcgaatcctgacatcccagaggcctataagcttcgtggatggtttgacgcagaaggacaagccttagatggtgtttccatctctgatctaaagagcggcggagtcggagggagtaacaccaactggaaaaccttgtatgaggtcaaatccgagaacctgggccaaggcgacaagccggactactttagttctgtggccacagtggtgtatcttcgcaaagagaactgcatgtaccaagcctgcccgactcaggactgcaataagaaagtgattgatcaacagaatggattgtaccgctgtgagaagtgcgacaccgaatttcccaatttcaagtaccgcatgatcctgtcagtaaatattgcagattttcaagagaatcagtgggtgacttgtttccaggagtctgctgaagctatccttggacaaaatgctgcttatcttggggaattaaaagacaagaatgaacaggcatttgaagaagtttccagaatgc

SEQ ID NO: 212 - DNA, 1229 bp, Homo Sapiens
  misc_feature (1)..(1): n is a, c, g, or t
  misc_feature (991)..(991): n is a, c, g, or t
  misc_feature (995)..(995): n is a, c, g, or t
  misc_feature (997)..(997): n is a, c, g, or t
  misc_feature (1022)..(1022): n is a, c, g, or t
  misc_feature (1025)..(1025): n is a, c, g, or t
  misc_feature (1028)..(1028): n is a, c, g, or t
  misc_feature (1033)..(1033): n is a, c, g, or t
  misc_feature (1056)..(1056): n is a, c, g, or t
  misc_feature (1061)..(1061): n is a, c, g, or t
  misc_feature (1069)..(1069): n is a, c, g, or t
  misc_feature (1085)..(1085): n is a, c, g, or t
  misc_feature (1093)..(1093): n is a, c, g, or t
  misc_feature (1095)..(1095): n is a, c, g, or t
  misc_feature (1099)..(1099): n is a, c, g, or t
  misc_feature (1104)..(1104): n is a, c, g, or t
  misc_feature (1111)..(1111): n is a, c, g, or t
  misc_feature (1118)..(1118): n is a, c, g, or t
  misc_feature (1126)..(1126): n is a, c, g, or t
  misc_feature (1130)..(1130): n is a, c, g, or t
  misc_feature (1135)..(1135): n is a, c, g, or t
  misc_feature (1143)..(1143): n is a, c, g, or t
  misc_feature (1152)..(1152): n is a, c, g, or t
  misc_feature (1164)..(1164): n is a, c, g, or t
  misc_feature (1184)..(1184): n is a, c, g, or t
  misc_feature (1196)..(1196): n is a, c, g, or t
  misc_feature (1202)..(1202): n is a, c, g, or t
  misc_feature (1222)..(1222): n is a, c, g, or t
naattagagaaattactatgagaggatcgcatcaccatcaccatcacggatcctatttaggtgacactatagaatcgtcgacccacgcgtccgctcgctgtcgccgccgctgccacaccatggccttcgtcaccaggcagttcatgcgttccgtgtcctcctcgtccaccgcctcggcctcggccaagaagataatcgtcaagcacgtgacggtcatcggcggcgggctgatgggcgccggcattgcccaggttgctgcagcaactggtcacacagtagtgttggtagaccagacagaggacatcctggcaaaatccaaaaagggaattgaggaaagccttaggaaagtggcaaagaagaagtttgcagaaaaccctaaggccggcgatgaatttgtggagaagaccctgagcaccatagcgaccagcacggatgcagcctccgttgtccacagcacagacttggtggtggaagccatcgtggagaatctgaaggtgaaaaacgagctcttcaaaaggctggacaagtttgctgctgaacatacaatctttgccagcaacacttcctccttgcagattacaagcatagctaatgccaccaccagacaagaccgattcgctggcctccatttcttcaacccagtgcctgtcatgaaacttgtggaggtcattaaaacaccaatgaccagccagaagacatttgaatctttggtagactttagcaaagccctaggaaagcatcctgtttcttgcaaggacactcctgggtttattgtgaaccgcctcctggttccatacctcatggaagcaatcaggctgtatgaacgaggtgacgcatccaaagaagacattgacactgctatgaaattaggagccggttaccccatgggcccatttgagcttctagattatgtcggactggatactacgaagttcatcgtggatgggtggcatgaaatggatgcaaaaaacccattacatcagcccagccnatcntnaataagctggtaccaaaaaaaagtncgncanaaaantggaaaagattttacaatacaantgatntgcagctncccggcttgaaaaaanccctgaancncttncaccnaggcccnatgcttnggaatgtnttgntcaanttcccccncagaaagtnaaaagggctttngttggaccttcgaaggtttnccccttccgcgnaaaatnccctaaaaaaatccttttancggcctt

SEQ ID NO: 213 - DNA, 1185 bp, Homo Sapiens
  misc_feature (1)..(1): n is a, c, g, or t
  misc_feature (3)..(3): n is a, c, g, or t
  misc_feature (880)..(880): n is a, c, g, or t
  misc_feature (889)..(889): n is a, c, g, or t
  misc_feature (891)..(891): n is a, c, g, or t
  misc_feature (909)..(909): n is a, c, g, or t
  misc_feature (931)..(931): n is a, c, g, or t
  misc_feature (947)..(947): n is a, c, g, or t
  misc_feature (959)..(959): n is a, c, g, or t
  misc_feature (968)..(968): n is a, c, g, or t
  misc_feature (980)..(980): n is a, c, g, or t
  misc_feature (997)..(997): n is a, c, g, or t
  misc_feature (1004)..(1004): n is a, c, g, or t
  misc_feature (1021)..(1021): n is a, c, g, or t
  misc_feature (1031)..(1031): n is a, c, g, or t
  misc_feature (1048)..(1048): n is a, c, g, or t
  misc_feature (1056)..(1056): n is a, c, g, or t
  misc_feature (1065)..(1065): n is a, c, g, or t
  misc_feature (1071)..(1071): n is a, c, g, or t
  misc_feature (1097)..(1098): n is a, c, g, or t
  misc_feature (1109)..(1109): n is a, c, g, or t
  misc_feature (1114)..(1114): n is a, c, g, or t
  misc_feature (1120)..(1120): n is a, c, g, or t
  misc_feature (1122)..(1122): n is a, c, g, or t
  misc_feature (1130)..(1130): n is a, c, g, or t
  misc_feature (1143)..(1143): n is a, c, g, or t
  misc_feature (1146)..(1146): n is a, c, g, or t
  misc_feature (1155)..(1155): n is a, c, g, or t
  misc_feature (1158)..(1159): n is a, c, g, or t
  misc_feature (1161)..(1161): n is a, c, g, or t
  misc_feature (1167)..(1167): n is a, c, g, or t
  misc_feature (1185)..(1185): n is a, c, g, or t
nanttagagaaattactatgagaggatcgcatcaccatcaccatcacggatcctatttaggtgacactatagaatcgtcgacccacgcgtccgaacagaagaagcgtgaagaagaggcacgactccttgaaactggaactggccccttacatgatgagaaagatgaatccctgtgtctgtcttcttcctgcgaaggggctgcaggcaccccgaggcctgctggagaaccggcctgggttactcagtttgtgcagaagaaagaagagagggacctggtggaccgactaaaggcggagcaggccaggaggaagcagcgagaagaacgcctgcagcagctgcagcacagggtgcagctcaagtatgcagccaagcgcctgaggcaggaagaagaagaaagagagaatctcctccgcctcagcagggagatgctagagacaggcccggaggctgagcggctggagcagctggagtctggggaggaggagctggtcctcgccgaatacgagagtgatgaggagaaaaaggtggcgagcagagtggatgaggatgaggatgacctggaggaagaacacataactaagatttattactgtagtcggacacactcccagctggcccagtttgtgcatgaggtgaagaagagcccctttggcaaggatgttcggctggtctcccttggctcccggcagaacctttgtgtaaatgaagacgtgaaaagcctaggttctgtgcagcttatcaacgaccgctgcgtggacatgcagagaagcagagaagaagaaaggagctgaggaggagaagccaaagaggaggaggcaggagaagcaggcagcctgccccttctacaaccacgagcagatgggccttctccgggatgagnccctggcanangtgaaggacatggagcanctgctggcccttgggaaggagncccgggcctgtccctnttacgggaagcngccttgccntccttgcagccnagctgggggtgctgccntttcaangctgctgcatgcggccnctcggcaggncccggggcttccggttncaggaacnagtggggtntcttcnacaaggccccaacctgttcaaccctnncggggctgccncgcgnggagtnanggttccanttttgccaggccnttnccaattttntannantggaangttcgggaaccttttagn

SEQ ID NO: 214 - DNA, 944 bp, Homo Sapiens
  misc_feature (853)..(853): n is a, c, g, or t
  misc_feature (856)..(856): n is a, c, g, or t
  misc_feature (862)..(862): n is a, c, g, or t
  misc_feature (885)..(885): n is a, c, g, or t
  misc_feature (903)..(903): n is a, c, g, or t
  misc_feature (910)..(910): n is a, c, g, or t
  misc_feature (922)..(927): n is a, c, g, or t
  misc_feature (929)..(933): n is a, c, g, or t
  misc_feature (935)..(944): n is a, c, g, or t
gaatagagaaattactatgagaggatcgcatcaccatcaccatcacggatcctatttaggtgacactatagaatcgtcgacccacgcgtccggtcgggctttacggcgccggatggctctggacgtgaagtctcgggcaaagcgttatgagaagctggacttccttggggagggacagtttgccaccgtttacaaggccagagataagaataccaaccaaattgtcgccattaagaaaatcaaacttggacatagatcagaagctaaagatggtataaatagaaccgccttaagagagataaaattattacaggagctaagtcatccaaatataattggtctccttgatgcttttggacataaatctaatattagccttgtctttgattttatggaaactgatctagaggtaagattaagattcctggagaaattcctttgtcccagtttatcaaacaagaacctaaatatttgttttctacccaagaagatactggtagtaaaagaaaaaaagcttaattttgttgaaatttggatgtactctgaggcaaaaggatctcgagttattttcttctaatcatttagtgatatccccagtgttacatacaaagatttggatttcattggcatttctgccttctaagttcccatagctagttgacgtcatttttggagaaatgagcattagacctataagatttgtttgcttttttttttttttgtgatggagtctcagtctgttcacccagcctggagtgcaatggcgtgatctgggctctctgcagccatcacctcctgggttccagtgattctctcacttcagcctcccaagtagctgggattacaggtgccnccncgcccngctaaattttatattttaagtanagacggggtgtcacctgngggcccngggctgggtttnnnnnncnnnnncnnnnnnnnnn

SEQ ID NO: 215 - DNA, 962 bp, Homo Sapiens
  misc_feature (4)..(4): n is a, c, g, or t
  misc_feature (837)..(837): n is a, c, g, or t
  misc_feature (855)..(855): n is a, c, g, or t
  misc_feature (864)..(864): n is a, c, g, or t
  misc_feature (925)..(925): n is a, c, g, or t
  misc_feature (934)..(934): n is a, c, g, or t
  misc_feature (939)..(939): n is a, c, g, or t
  misc_feature (942)..(943): n is a, c, g, or t
  misc_feature (945)..(945): n is a, c, g, or t
  misc_feature (948)..(961): n is a, c, g, or t
aaantagagaaattactatgagaggatcgcatcaccatcaccatcacggatcctatttaggtgacactatagaatcgtcgacccacgcgtccgtgcatgtcatggccgcctccatggcccggggaggcgtgagtgccagggttctgctgcaggctgccaggggcacctggtggaacagacctgggggcacttccgggtcgggggagggggtggcgctggggacaaccagaaagtttcaagcgacaggctcgcgcccggcgggagaggaggacgcgggcggcccggagcggcccggggacgtggtgaacgtggtgttcgtagaccgctcaggccagcggatcccagtgagtggcagagtcggggacaatgttcttcacctggcccagcgccacggggtggacctggaaggggcctgtgaagcctccctggcctgctccacctgccatgtgtatgtgagtgaagaccacctggatctcctgcctcctcccgaggagagggaagacgacatgctagacatggcccccctcctccaggagaactcgcggctgggctgccagattgtgctgacaccggagctggaaggagcggaattcaccctgcccaagatcaccaggaacttctacgtggatggccatgtccccaagccccactgacatgaacacctggaccattccacattgccatggccccagggcccagattgagggaatagccaggtgccagccctgcccagagtgcggacaggcccgggagagacgtggaagcccctgtgaaggacaacacccctgcttgggagagagtcccatgtccaggctctggtggggacagggcccctantggggtggccttccccangcccctganaatcagggtttgaagtaagaagtggactcatattggagctgcattaattcgattaacccgnaaaaaaaanaaaanaannanatnnnnnnnnnnnnnna

SEQ ID NO: 216 - DNA, 1178 bp, Homo Sapiens
  misc_feature (1)..(1): n is a, c, g, or t
  misc_feature (5)..(5): n is a, c, g, or t
  misc_feature (17)..(17): n is a, c, g, or t
  misc_feature (845)..(845): n is a, c, g, or t
  misc_feature (893)..(893): n is a, c, g, or t
  misc_feature (908)..(908): n is a, c, g, or t
  misc_feature (914)..(914): n is a, c, g, or t
  misc_feature (944)..(944): n is a, c, g, or t
  misc_feature (955)..(955): n is a, c, g, or t
  misc_feature (970)..(970): n is a, c, g, or t
  misc_feature (978)..(978): n is a, c, g, or t
  misc_feature (994)..(994): n is a, c, g, or t
  misc_feature (1001)..(1001): n is a, c, g, or t
  misc_feature (1017)..(1017): n is a, c, g, or t
  misc_feature (1020)..(1020): n is a, c, g, or t
  misc_feature (1024)..(1024): n is a, c, g, or t
  misc_feature (1030)..(1030): n is a, c, g, or t
  misc_feature (1040)..(1040): n is a, c, g, or t
  misc_feature (1049)..(1049): n is a, c, g, or t
  misc_feature (1053)..(1053): n is a, c, g, or t
  misc_feature (1055)..(1055): n is a, c, g, or t
  misc_feature (1069)..(1069): n is a, c, g, or t
  misc_feature (1072)..(1072): n is a, c, g, or t
  misc_feature (1081)..(1081): n is a, c, g, or t
  misc_feature (1092)..(1092): n is a, c, g, or t
  misc_feature (1097)..(1097): n is a, c, g, or t
  misc_feature (1099)..(1099): n is a, c, g, or t
  misc_feature (1103)..(1103): n is a, c, g, or t
  misc_feature (1110)..(1110): n is a, c, g, or t
  misc_feature (1115)..(1115): n is a, c, g, or t
  misc_feature (1121)..(1121): n is a, c, g, or t
  misc_feature (1125)..(1125): n is a, c, g, or t
  misc_feature (1129)..(1129): n is a, c, g, or t
  misc_feature (1135)..(1135): n is a, c, g, or t
  misc_feature (1138)..(1138): n is a, c, g, or t
  misc_feature (1144)..(1144): n is a, c, g, or t
  misc_feature (1147)..(1147): n is a, c, g, or t
  misc_feature (1160)..(1161): n is a, c, g, or t
  misc_feature (1169)..(1169): n is a, c, g, or t
naatnagagagaattanctatgagaggatcgcatcaccatcaccatcacggatcctatttaggtgacactatagaatcgtcgacccacgcgtccggcaacaatttcattggtggttacttctgctcctgccccccggaatatttcctccatgatgacatgaagaattgcggagttaattgcagtggggatgtattcactgcactgattggggagattgcaagtcccaattatcccaaaccatatccagagaactcaaggtgtgaataccagatccggttggagaaagggttccaagtggtggtgaccttgcggagagaagattttgatgtggaagcagctgactcagcgggaaactgccttgacagtttagtttttgttgcaggagatcggcaatttggtccttactgtggtcatggattccctgggcctctaaatattgaaaccaagagtaatgctcttgatatcatcttccaaactgatctaacagggcaaaaaaagggctggaaacttcgctatcatggagatccaatgccctgccctaaggaagacactcccaattctgtttgggagcctgcgaaggcaaaatatgtctttagagatgtggtgcagataacctgtctggatgggtttgaagttgtggagggacgtgttggtgcaacatctttctattcgacttgtcaaagcaatggaaagtggagtaattccaaactgaaatgtcaacctgtggactgtggcattcctgaatccattgagaatggtaaagttgaagacccagagagcactttgtttggttctgtcatccgctacacttgtgaggagccatattactacatggaaaatggangaaggtggggagtatcactgtgctggtaacgggagctgggtgaatgangtgctgggcccgganctgccnaaaatgtgttccagtctgtggagtccccanaaaaccctttngaagaaaaaccagangataaatngggaggatccgatgcnaatattnaaaacttccccctggnaangtcntctttnaaaaccccangggctgggnggancncctcattaatgaanacnggggtgctnacgcctgcccntgttntngganggaaacngggancccaanaagntttntggggnccncctcanggnaaaacccccgggnngggaaaancccaaaagg

SEQ ID NO: 217 - DNA, 1387 bp, Homo Sapiens
  misc_feature (1)..(1): n is a, c, g, or t
  misc_feature (986)..(986): n is a, c, g, or t
  misc_feature (1188)..(1188): n is a, c, g, or t
  misc_feature (1385)..(1385): n is a, c, g, or t
nttaagagatacatgagaggatcgcatcaccatcaccatcacggtcgacccacgcgtccgcccacgcgtccggccatggcggccagcggggctgtggaaccagggcccccgggggctgccgtcgccccgtcgcccgccccggccccgccgcctgcccctgatcacctgttccggcccatcagcgccgaggacgaggagcagcagcccaccgagatcgagtcgctatgcatgaactgttactgcaatggcatgacgcgcctcctgctcaccaagattcccttcttcagagaaataatagtgagctccttttcctgcgagcactgtggctggaacaacacggagatccagtcggcaggcaggatccaggaccagggagtgcgctacactttgtctgtcagggctctggaggacatgaacagagaagtggtgaagactgactctgctgccacaaggattcctgagctagattttgaaattcctgcctttagccagaaaggagctctgaccactgttgaaggattgatcacccgtgctatctctggcctggagcaggaccagcctgcacgaagggcaaacaaagatgctacagctgaaagaattgatgagttcattgtcaaactgaaggagctaaagcaagtagcctcccctttcactctgatcattgatgatcccctcaggaacagttttggggaaaacccacatgctcctcaaaaaaaagatggcctggtgaatcacaaactaaaaccggaacccacagctggaaaagatgttgggcttcatcaaaaacccccataaaaaaagcccaaaagaaaaaccttaaaattgaaaggctcccttttatccaaacctcccaaaatgcttgcccccactttaatcaattttgactaatccacaccctcaacttaatgattttctctctgctaacacattggaaaaaagacggattctctattattaactcaaacattctccaactcacatacttntacctctattgcccattactactctgtgttcatattctctctaaccctttcctttctacttttacccgcttaattactatctaaaatttaacccccaccctcactaattaccaattcctcctattacttctttaaactcgctaatatatgctctctcttcacccttcccttaatttatttattaccactattcaacactccntcaatatcccatctcctctgactttatctttcctctttacctacccacccctctttacttacatcctccttcttctgcacactacatcaacccatctcctttcctctacaaccaataatctatcctataattccctatctccctatctttacccatacttatgtcaaatcaattacaccgatcattctcccaccccntc

SEQ ID NO: 218 - DNA, 1179 bp, Homo Sapiens
  misc_feature (866)..(866): n is a, c, g, or t
  misc_feature (895)..(895): n is a, c, g, or t
  misc_feature (900)..(900): n is a, c, g, or t
  misc_feature (920)..(920): n is a, c, g, or t
  misc_feature (942)..(942): n is a, c, g, or t
  misc_feature (947)..(947): n is a, c, g, or t
  misc_feature (949)..(950): n is a, c, g, or t
  misc_feature (960)..(960): n is a, c, g, or t
  misc_feature (985)..(985): n is a, c, g, or t
  misc_feature (991)..(991): n is a, c, g, or t
  misc_feature (1005)..(1005): n is a, c, g, or t
  misc_feature (1007)..(1007): n is a, c, g, or t
  misc_feature (1020)..(1020): n is a, c, g, or t
  misc_feature (1025)..(1025): n is a, c, g, or t
  misc_feature (1029)..(1029): n is a, c, g, or t
  misc_feature (1032)..(1032): n is a, c, g, or t
  misc_feature (1058)..(1058): n is a, c, g, or t
  misc_feature (1067)..(1067): n is a, c, g, or t
  misc_feature (1074)..(1074): n is a, c, g, or t
  misc_feature (1077)..(1077): n is a, c, g, or t
  misc_feature (1081)..(1081): n is a, c, g, or t
  misc_feature (1091)..(1092): n is a, c, g, or t
  misc_feature (1094)..(1094): n is a, c, g, or t
  misc_feature (1115)..(1115): n is a, c, g, or t
  misc_feature (1125)..(1125): n is a, c, g, or t
  misc_feature (1131)..(1131): n is a, c, g, or t
  misc_feature (1140)..(1140): n is a, c, g, or t
  misc_feature (1144)..(1144): n is a, c, g, or t
  misc_feature (1147)..(1147): n is a, c, g, or t
  misc_feature (1156)..(1156): n is a, c, g, or t
  misc_feature (1175)..(1175): n is a, c, g, or t
  misc_feature (1178)..(1178): n is a, c, g, or t
tagagaaattactatgagaggatcgcatcaccatcaccatcacggatcctatttaggtgacactatagaatcgtcgacccacgcgtccgggttcttttcccccaccacccccccagcggagcccatcgtggtgaggcttaaggaggtccgactgcagagggacgacttcgagattctgaaggtgatcggacgcggggcgttcagcgaggtagcggtagtgaagatgaagcagacgggccaggtgtatgccatgaagatcatgaacaagtgggacatgctgaagaggggcgaggtgtcgtgcttccgtgaggagagggacgtgttggtgaatggggaccggcggtggatcacgcagctgcacttcgccttccaggatgagaactacctgtacctggtcatggagtattacgtgggcggggacctgctgacactgctgagcaagtttggggagcggattccggccgagatggcgcgcttctacctggcggagattgtcatggccatagactcggtgcaccggcttggctacgtgcacagggacatcaaacccgacaacatcctgctggaccgctgtggccacatccgcctggccgacttcggctcttgcctcaagctgcgggcagatggaacggtgcggtcgctggtggctgtgggcaccccagactacctgtcccccgagatcctgcaggctgtgggcggtgggcctgggacaggcagctacgggcccgagtgtgactggtgggcgctgggtgtattcgcctatgaaatgttctatgggcagacgcccttctacgcggattccacggcggagacctatggcaagatcgtccactacaaggagcacctctctctgccgctggtggacnaagggtccctgaggaggctcgagacttcnttcancggttgctgtgtccccccgnaaacacggctgggccggggtgnaacangnnacttccgganacatccccttcttctttggcctccnactggnatggtctccggganancgtgccccccttnacccngganttncaaagggcccccgaaacatgcaattncaattggtngaagaanggnctcnctgccatggnnancggggcggggaaaaactttcngaaattcggnaaaggncccccctangggnccnccgcctttnggggctcccctaccctgcnggnc

SEQ ID NO: 219 - DNA, 897 bp, Homo Sapiens
  misc_feature (2)..(2): n is a, c, g, or t
  misc_feature (4)..(5): n is a, c, g, or t
  misc_feature (11)..(11): n is a, c, g, or t
  misc_feature (683)..(683): n is a, c, g, or t
  misc_feature (687)..(687): n is a, c, g, or t
  misc_feature (693)..(693): n is a, c, g, or t
  misc_feature (720)..(720): n is a, c, g, or t
  misc_feature (724)..(724): n is a, c, g, or t
  misc_feature (738)..(738): n is a, c, g, or t
  misc_feature (747)..(747): n is a, c, g, or t
  misc_feature (768)..(768): n is a, c, g, or t
  misc_feature (770)..(770): n is a, c, g, or t
  misc_feature (772)..(772): n is a, c, g, or t
  misc_feature (776)..(776): n is a, c, g, or t
  misc_feature (781)..(781): n is a, c, g, or t
  misc_feature (804)..(804): n is a, c, g, or t
  misc_feature (808)..(809): n is a, c, g, or t
  misc_feature (811)..(811): n is a, c, g, or t
  misc_feature (813)..(814): n is a, c, g, or t
  misc_feature (816)..(816): n is a, c, g, or t
  misc_feature (820)..(820): n is a, c, g, or t
  misc_feature (824)..(824): n is a, c, g, or t
  misc_feature (836)..(836): n is a, c, g, or t
  misc_feature (848)..(848): n is a, c, g, or t
  misc_feature (853)..(855): n is a, c, g, or t
  misc_feature (863)..(863): n is a, c, g, or t
  misc_feature (875)..(875): n is a, c, g, or t
  misc_feature (879)..(880): n is a, c, g, or t
  misc_feature (886)..(886): n is a, c, g, or t
  misc_feature (896)..(896): n is a, c, g, or t
gnannagaganattactatgagaggatcgcatcaccatcaccatcacggatcctatttaggtgacactatagaatcgtcgacccacgcgtccgccgagcccggcgggaccatgtttcaccagcaccggctccagtgggctctacaaggcgcctctgtcgaagagccttctgctggtccccagtgccctctccctcctgctcgccctcctcctgcctcactgccagaagctctttgtgtatgaccttcacgcagtcaagaacgacttccagatttggaggttgatatgtggaagaataatttgccttgatttgaaagatactttctgcagtagtctgcttatttataattttaggatatttgaaagaagatatggaagcagaaaatttgcatcctttttgctgggttcctgggttttgtcagccttatttgactttctcctcattgaagctatgcagtatttctttggcatcactgcagctagtaatttgccttctggattcctggcacctgtgtttgctctgtttgtaccattttactgctccataccaagagtccaagtggcacaaattctgggtccgttgtccatcacaaaacaagacattgatttatatattgggactgcagcttttcacctctggttcctacatctggattgtaagccataagtggacttatgtccggnctgngctacnacagcaaaaatgttccaaggtgcatcnaggngcctctgcattccncagctggangggcaaaaattcttttcttgnanancttngaaanccatcttctctttcttcaaaaanccannancnnanccanaaantggtatgggaanccacccctgganatccnnngaaacaancaaaaaaatggnaacnngctggnaccgggaagnc

SEQ ID NO: 220 - DNA, 673 bp, Homo Sapiens
  misc_feature (3)..(3): n is a, c, g, or t
  misc_feature (9)..(9): n is a, c, g, or t
  misc_feature (15)..(15): n is a, c, g, or t
  misc_feature (275)..(275): n is a, c, g, or t
  misc_feature (335)..(335): n is a, c, g, or t
  misc_feature (388)..(388): n is a, c, g, or t
  misc_feature (445)..(445): n is a, c, g, or t
  misc_feature (455)..(456): n is a, c, g, or t
  misc_feature (464)..(465): n is a, c, g, or t
  misc_feature (474)..(474): n is a, c, g, or t
  misc_feature (494)..(494): n is a, c, g, or t
  misc_feature (497)..(497): n is a, c, g, or t
  misc_feature (501)..(501): n is a, c, g, or t
  misc_feature (504)..(505): n is a, c, g, or t
  misc_feature (547)..(547): n is a, c, g, or t
  misc_feature (550)..(550): n is a, c, g, or t
  misc_feature (553)..(553): n is a, c, g, or t
  misc_feature (555)..(555): n is a, c, g, or t
  misc_feature (563)..(563): n is a, c, g, or t
  misc_feature (593)..(593): n is a, c, g, or t
  misc_feature (596)..(596): n is a, c, g, or t
  misc_feature (612)..(612): n is a, c, g, or t
  misc_feature (619)..(620): n is a, c, g, or t
  misc_feature (622)..(622): n is a, c, g, or t
  misc_feature (627)..(627): n is a, c, g, or t
  misc_feature (629)..(631): n is a, c, g, or t
  misc_feature (634)..(634): n is a, c, g, or t
  misc_feature (636)..(637): n is a, c, g, or t
  misc_feature (645)..(645): n is a, c, g, or t
  misc_feature (671)..(671): n is a, c, g, or t
tcnttacgnaggagnattaactatgagaggatcgcatcaccatcaccatcacgggatcctatttaggtgacactatagaatcgtcgacccacgcgtccgcccacgcgtccgccaaagttcagatctcagaggtggatgccccgccggagggtgaccagatgccaagctccacagactccaggggcctgaagcccctgcaggaggacaccccacagctgatgcgcacacgcagtgatgttggggtgcgtcgccgtggcaatgtgaggacgcctagngaccagcggcgaatcagacgccaccgcttctccatcaacggccatttctacaaccataanacatccgtgttcacaccagcctatggctctgtcaccaacgtccgcatcaacancaccatgaccaccccacaggtcctgaagctgctgctcaaaaaattttaaacattganaattcccggnngaggtagnnttgcctttngtaccgttgcttccatacgnacnggcnacnnaaaacacgaaagcctggaaaggacccacccgcatttaccccngcntgnanttgccccnaacatctcctcccacgggaccccaatgggnganccaaaaactcccacanaagcggnntnccctnannnagnannaaaagacntccccaaggctgggcaagggaaatgncc

SEQ ID NO: 221 - DNA, 1275 bp, Homo Sapiens
  misc_feature (1061)..(1061): n is a, c, g, or t
  misc_feature (1113)..(1113): n is a, c, g, or t
  misc_feature (1138)..(1139): n is a, c, g, or t
  misc_feature (1201)..(1201): n is a, c, g, or t
  misc_feature (1205)..(1205): n is a, c, g, or t
  misc_feature (1213)..(1213): n is a, c, g, or t
  misc_feature (1226)..(1228): n is a, c, g, or t
  misc_feature (1232)..(1236): n is a, c, g, or t
  misc_feature (1240)..(1240): n is a, c, g, or t
  misc_feature (1244)..(1244): n is a, c, g, or t
  misc_feature (1248)..(1248): n is a, c, g, or t
  misc_feature (1257)..(1258): n is a, c, g, or t
taagagattacttgagaggatcgcatcaccatcaccatcacggtcgacccacgcgtccggccgcacctacaccagccaacccagatcccgaggtccgacagcgcccggcccagatccccacgcctgccaggagcaagccgagagccagccggccggcgcactccgactccgagcagtctctgtccttcgacccgagccccgcgccctttccgggacccctgccccgcgggcagcgctgccaacctgccggccatggagaccccgtcccagcggcgcgccacccgcagcggggcgcaggccagctccactccgctgtcgcccacccgcatcacccggctgcaggagaaggaggacctgcaggagctcaatgatcgcttggcggtctacatcgaccgtgtgcgctcgctggaaacggagaacgcagggctgcgccttcgcatcaccgagtctgaagaggtggtcagccgcgaggtgtccggcatcaaggccgcctacgaggccgagctcggggatgcccgcaagacccttgactcagtagccaaggagcgcgcccgcctgcagctggagctgagcaaagtgcgtgaggagtttaaggagctgaaagcgcgcaataccaagaaggagggtgacctgatagctgctcaggctcggctgaaggacctggaggctctgctgaactccaaggaggccgcactgagcactgctctcagtgagaagcgcacgctggagggcgagctgcatgatctgcggggccaggtggccaagcttgaggcagccctaggtgagggcaagaagcaacttcaggatgagatgctgcggcggggtggatgctgagaacaggctgcagaccatgaaggaggaactggacttccagaaaacatctaccgtgaggagctgcgtgagaccagcgccgtcatgagaccgactgggggagattgacatggggagcaccgtgagtttgaaagccgctggcggagccctgcaggactggcggcccacatgaggaccggtgggacatataaaaaggattgaaaaaactatctgcaagcgggaaaggcagnaatctgctgaaaggaaacacctgggggggtgccccaagaattgaaaatcggnttcccattaaagctcctgccagttnncactcaaaaaaggggacaaggaggaattcaaactggggatctggccggagggaccccccggntttnggaaaagngagatgccatggnnnggtnnnnnctgnaaanaaanttgtgaccnngcccgcggaaccccccc

SEQ ID NO: 222 - DNA, 1231 bp, Homo Sapiens
  misc_feature (919)..(919): n is a, c, g, or t
  misc_feature (946)..(946): n is a, c, g, or t
  misc_feature (972)..(972): n is a, c, g, or t
  misc_feature (978)..(978): n is a, c, g, or t
  misc_feature (990)..(990): n is a, c, g, or t
  misc_feature (999)..(999): n is a, c, g, or t
  misc_feature (1019)..(1019): n is a, c, g, or t
  misc_feature (1025)..(1026): n is a, c, g, or t
  misc_feature (1038)..(1038): n is a, c, g, or t
  misc_feature (1045)..(1045): n is a, c, g, or t
  misc_feature (1054)..(1054): n is a, c, g, or t
  misc_feature (1061)..(1061): n is a, c, g, or t
  misc_feature (1065)..(1065): n is a, c, g, or t
  misc_feature (1076)..(1076): n is a, c, g, or t
  misc_feature (1083)..(1083): n is a, c, g, or t
  misc_feature (1093)..(1093): n is a, c, g, or t
  misc_feature (1095)..(1095): n is a, c, g, or t
  misc_feature (1103)..(1103): n is a, c, g, or t
  misc_feature (1108)..(1108): n is a, c, g, or t
  misc_feature (1112)..(1113): n is a, c, g, or t
  misc_feature (1123)..(1123): n is a, c, g, or t
  misc_feature (1125)..(1126): n is a, c, g, or t
  misc_feature (1129)..(1129): n is a, c, g, or t
  misc_feature (1134)..(1134): n is a, c, g, or t
  misc_feature (1139)..(1139): n is a, c, g, or t
  misc_feature (1142)..(1142): n is a, c, g, or t
  misc_feature (1158)..(1158): n is a, c, g, or t
  misc_feature (1161)..(1161): n is a, c, g, or t
  misc_feature (1172)..(1172): n is a, c, g, or t
  misc_feature (1190)..(1190): n is a, c, g, or t
  misc_feature (1195)..(1196): n is a, c, g, or t
  misc_feature (1209)..(1209): n is a, c, g, or t
  misc_feature (1218)..(1218): n is a, c, g, or t
  misc_feature (1223)..(1223): n is a, c, g, or t
  misc_feature (1225)..(1225): n is a, c, g, or t
  misc_feature (1228)..(1228): n is a, c, g, or t
tagagagattactatgagaggatcgcatcaccatcaccatcacggatcctatttaggtgacactatagaatcgtcgacccacgcgtccgcccacgcgtccgccgctcctcctcctggcaggccggccgcggagtcagctgacgccggcgctccagcctcgcctccccgcgccgcgctctgcgctccccgaaagtggctgcaagccggccgcccactgtcagggttggggggacagagaaagtgatgtgcgccttctaaagcctcgcccagcgccgccgaagcagcttcacctctccaactttctcccaccgactgcttgtcttgaccctgccctccaccctccccagagccacttcgggtgcgcgctcttgggtaaagggggggtcaccggctgtctgggatggcttccaattttaatgacatagtgaagcaagggtacgtgaggatccggagcagacgcctcgggatttatcagcgatgctggttagtattcaagaaagcttcaagcaaaggtccaaaaagactggagaaattttctgatgaacgtgctgcatatttcaggtgttatcataaggttacagaactcaataatgtgaagaacgtagctcgattgccaaaaagcaccaagaaacatgccatagggatttatttcaatgacgatacctccaagacttttgcttgcgaatcagatcttgaggctgatgagtggtgcaaagtactccagatggagtgtgtaggaacacggatcaatgacatcagccttggagagcctgacttactggccactggggttgagagagaacagagtgagagattcaatgtgtatttgatgccatctcctaacttaaatgtacatggcgaatgtgccttgcaaattacatatgagtatatctgtctttggggacgtccaaaatcccanagtcaaactcatctcttggccgctaancgccctggcggcggtatggacgtganactacntggttcactttnaagcaaggnagaatgtttaaaactggttnaagggnntgttattttttnaaacccnaaacggggnggccatntatnaaaaagtccanctttggntgctttggcnanaacccaanaacanaaanntttgttaaanannggnaaaantccantcntcaaaaaaaaataaanaangggccccctcnctaaaaaaatggggcccntgctnnaaagcctatgggnaaaattaangggananaanggg

SEQ ID NO: 223 - DNA, 1034 bp, Homo Sapiens
tatgagaggatcgcatcaccatcaccatcacggatcctatttaggtgacactatagaatcgtcgacccacgcgtccgcagcaagtgttaaagatcttccaggacttaagacaccagtaggtagaggaagagcctggcttcgtttggcattaatgcaaaagaaactttcagaatatatgaaagctttgatcaataagaaagaacttctcagtgaattctacgaacccaatgccctcatgatggaagaagaaggagccataattgctggtctgttggtgggtctgaatgtcattgatgccaatttctgtatgaaaggagaagacttggactctcaggttggagttatagatttttcaatgtatctcaaggacgggaacagcagtaaaggtactgaaggagacggtcagattactgcaattctggaccagaagaactatgtagaagaactgaacagacatttgaatgctactgtaaacaaccttcaggcaaaagtagatgcattagaaaaatccaacactaaactgacagaggagcttgcagttgcaaacaacaggatcattaccttacaagaagaaatggaacgagttaaagaggaaagttcctacatactggaatccaatcggaagggtcccaagcaagacagaactgcagaagggcaagcactaagtgaagcaagaaagcatttaaaagaagagacacaattacgattggatgttgagaaagaactggagatgcagatcagcatgaggcaggagatggaattggctatgaagatgctggagaaggatgtctgtgagaagcaggatgccctggtatctcttcggcagcagctggatgacctcagagctctcaagcatgaacttgcctttaagctgcagagttcagacttaggagtaaaacagaaaagtgaactaaacagtcgcttggaagagaagactaatcagatggctgctaccattaaacaacttgaacaaagtgaaaaggatttggtgaaacaggcaaagaccttaaatagtgcagcaaataaactgatcc

SEQ ID NO: 224 - DNA, 1164 bp, Homo Sapiens
  misc_feature (1)..(1): n is a, c, g, or t
  misc_feature (5)..(13): n is a, c, g, or t
  misc_feature (857)..(857): n is a, c, g, or t
  misc_feature (859)..(859): n is a, c, g, or t
  misc_feature (869)..(869): n is a, c, g, or t
  misc_feature (909)..(909): n is a, c, g, or t
  misc_feature (925)..(925): n is a, c, g, or t
  misc_feature (939)..(939): n is a, c, g, or t
  misc_feature (951)..(951): n is a, c, g, or t
  misc_feature (955)..(955): n is a, c, g, or t
  misc_feature (987)..(987): n is a, c, g, or t
  misc_feature (990)..(991): n is a, c, g, or t
  misc_feature (1026)..(1026): n is a, c, g, or t
  misc_feature (1040)..(1040): n is a, c, g, or t
  misc_feature (1043)..(1043): n is a, c, g, or t
  misc_feature (1046)..(1046): n is a, c, g, or t
  misc_feature (1050)..(1050): n is a, c, g, or t
  misc_feature (1059)..(1059): n is a, c, g, or t
  misc_feature (1078)..(1078): n is a, c, g, or t
  misc_feature (1083)..(1083): n is a, c, g, or t
  misc_feature (1093)..(1093): n is a, c, g, or t
  misc_feature (1097)..(1097): n is a, c, g, or t
  misc_feature (1106)..(1108): n is a, c, g, or t
  misc_feature (1135)..(1135): n is a, c, g, or t
  misc_feature (1138)..(1140): n is a, c, g, or t
  misc_feature (1145)..(1145): n is a, c, g, or t
  misc_feature (1157)..(1157): n is a, c, g, or t
  misc_feature (1159)..(1159): n is a, c, g, or t
  misc_feature (1163)..(1163): n is a, c, g, or t
nattnnnnnnnnnattagagaaattactatgagaggatcgcatcaccatcaccatcacggatcctatttaggtgacactatagaatcgtcgacccacgcgtccggttccgaggaagccagacccggagccgtggcctgccgggccggcgacatggatcccctgttccagcaaacgcacaagcaggtccacgagatccagtcttgcatgggacgcctggagacggcagacaagcagtctgtgcacatagtagaaaacgaaatccaagcaagcatagaccagatattcagccgtctagaacgtctggagattttgtccagcaaggagccccctaacaaaaggcaaaatgccaaacttcgggttgaccagttaaagtatgatgtccagcacctgcagactgcgctcagaaacttccagcatcggcgccatgcaagggagcagcaggagagacagcgagaagagcttctgtctcgaaccttcaccactaacgactctgacaccaccataccaatggacgaatcactgcagtttaactcctccctccagaaagttcacaacggcatggatgacctcattttagatgggcacaatattttagatggactgaggacccagagactgaccttgaaggggactcagaagaagatccttgacattgccaacatgctgggcttgtccaacacagtgatgcggctcatcgagaagcgggctttccaggacaagtactttatgataggtgggatgctgctgacctgtgtggtcatgttcctcgtggtgcagtacctgacatgagccagccacgctcagtggctgaacagcattcccacagcctgcaagtgtgtgtgtgtgtgaaaaaaanangggggcccanaggccgccttttgaaatgtttgcctgtctgaactgtgaanacacttgggagtgatngtggtctaatttcnaacctgctctgntttnctgtgacatcttggagggggaagctagtgccnccnnccatggcgcgggtgctttaggaaatgaaaaaaatncccggggtctgtcnctntcnctcnccgctctcnctggggggagggaaaaaantggcntttggggggntttntttcacccnnnctgaagccgtgcccctgggaaggggtnccnnngtgancccctgggttgnangaant

SEQ ID NO: 225 - DNA, 1155 bp, Homo Sapiens
  misc_feature (3)..(3): n is a, c, g, or t
  misc_feature (863)..(863): n is a, c, g, or t
  misc_feature (867)..(867): n is a, c, g, or t
  misc_feature (891)..(891): n is a, c, g, or t
  misc_feature (940)..(940): n is a, c, g, or t
  misc_feature (948)..(948): n is a, c, g, or t
  misc_feature (951)..(951): n is a, c, g, or t
  misc_feature (986)..(986): n is a, c, g, or t
  misc_feature (992)..(992): n is a, c, g, or t
  misc_feature (1000)..(1000): n is a, c, g, or t
  misc_feature (1014)..(1014): n is a, c, g, or t
  misc_feature (1023)..(1023): n is a, c, g, or t
  misc_feature (1028)..(1029): n is a, c, g, or t
  misc_feature (1037)..(1037): n is a, c, g, or t
  misc_feature (1040)..(1040): n is a, c, g, or t
  misc_feature (1042)..(1042): n is a, c, g, or t
  misc_feature (1054)..(1054): n is a, c, g, or t
  misc_feature (1059)..(1059): n is a, c, g, or t
  misc_feature (1062)..(1062): n is a, c, g, or t
  misc_feature (1068)..(1068): n is a, c, g, or t
  misc_feature (1077)..(1077): n is a, c, g, or t
  misc_feature (1085)..(1086): n is a, c, g, or t
  misc_feature (1088)..(1088): n is a, c, g, or t
  misc_feature (1094)..(1094): n is a, c, g, or t
  misc_feature (1098)..(1098): n is a, c, g, or t
  misc_feature (1107)..(1110): n is a, c, g, or t
  misc_feature (1114)..(1114): n is a, c, g, or t
  misc_feature (1124)..(1124): n is a, c, g, or t
  misc_feature (1136)..(1137): n is a, c, g, or t
  misc_feature (1150)..(1150): n is a, c, g, or t
  misc_feature (1155)..(1155): n is a, c, g, or t
atngagaaattactatgagaggatcgcatcaccatcaccatcacggatcctatttaggtgacactatagaatcgtcgacccacgcgtccgtgccctgcgaggagaagaaaacctacgactgcagcgagtgtggcaaggcctttagccgaagctcgtccctgataaagcaccaaaggatccacacgggagaaaagccgtttgagtgtgacacctgtgggaagcacttcatcgagcgctcgtccctcaccatccaccagcgggtgcacacgggcgagaagccctatgcctgcggggactgcggcaaggccttcagccagcgcatgaacctcactgtgcaccagcgcacgcacacgggcgagaagccgtatgtgtgcgacgtgtgtggcaaggccttccggaagacttcctctctcacccagcacgagcggatccacacgggggagaagccctacgcgtgcggggactgcggcaaggccttcagccagaacatgcacctcatcgtgcaccagcgcacgcacaccggggagaagccgtacgtgtgccccgagtgcgggcgagccttcagccagaacatgcacctgaccgagcaccagcgcacgcacaccggggagaagccgtacgcctgcaaggagtgcggcaaggccttcaacaagagctcctcgctcaccctgcaccagaggaaccacaccggcgagaagccctacgtgtgcggcgagtgcggcaaggccttcagccagagctcctacctcatccagcaccagcgcttccacatcggcgtgaagccgttcgagtgcagcgagtgcggcaaggccttcagcaagaactcctcgctcacgcagcaccagcgcatccacaccggcganaaanccctacgagtgctacatctgcaanaagcacttcacggggcgctcgtccctcatcgtgcaccaaatcgtgcacnccgggganaanccctacgtgtgcggcgagtgcggcaaggccttcanccaaancgcctacntcatcgagcaccancggatcccnccggnnaaaaaccntananggtgcggccagngcggnaantctttnttcaaaaantcttcctnncntgtgcnccancggattccnnnngggngaaaaacccntaccgatgcggnnaggggggaaaacntttan

SEQ ID NO: 226 - DNA, 908 bp, Homo Sapiens
catcaccatcaccatcacggatcctatttaggtgacactatagaatcgtcgacccacgcgtccgcaaatatggaaactcgttactttgcaaagaagaaaacccttcttggcttgagtaaattggctgcattagcttcagacttttcagaggatatgctacaagaaaaaattgaagaaatggctgagcaggagcgctttctactgcatcaggagaccctacctgaacagctgctggcggagaaacagctaaatctcagtgcgatgccagtattgactgcaccacaactcattggtctatatatctgtgaagaaaatagaagagctaatgaatatgatttcaagaaagctttggacttgttggaatatattgatgaggaagaagatataaatataaatgatctaaaactggaaatcctttgcaaagctcttcagagagataactggtccagttctgatggcaaagatgatccaattgaagtatctaaagacagtatatttgtgaagatcttacagaaacttttaaaagatggcattcagctcagtgagtacttaccggaggtgaaagacctgctacaagcggatcagcttggaagcttaaagtccaatccttacttcgagtttgttttgaaagcaaattatgaatattatgttcagggacaaatataactttttctaaaaatggccattgtttatgaaatctgtataagtgtgtccttatacaaattttaggccataaacaagtgtaagtttgtacaatttcataacatgtatagctgagtttttatactttatatgtaggaagctaatataaaatagttatgtaactgtgattttggttttcagttatgtgacttgttttttccacctgaaatgtgtcagttgttgttcctgtactcggtgccctttct

SEQ ID NO: 227 - DNA, 829 bp, Homo Sapiens
  misc_feature (757)..(757): n is a, c, g, or t
  misc_feature (774)..(774): n is a, c, g, or t
  misc_feature (777)..(777): n is a, c, g, or t
  misc_feature (802)..(802): n is a, c, g, or t
  misc_feature (821)..(821): n is a, c, g, or t
  misc_feature (824)..(824): n is a, c, g, or t
ttaactatgagaggatcgcatcaccatcaccatcacggatcctatttaggtgacactatagaatcgtcgacccacgcgtccgcccacgcgtccggcgaggaggagctttgcctagcttgcaggcagcgcagggcagacggcggcaggagaagcaagatgaatgcaggctcagatcctgtggtcatcgtctcggcggcgcggaccatcataggttccttcaatggtgccttagctgctgttcctgtccaggacctgggctccactgtcatcaaagaagtcttgaagagggccactgtggctccggaagatgtgtctgaggtcatctttggacatgtcttggcagcaggctgtgggcagaatcctgttagacaagccagtgtgggtgcaggaattccctactctgttccagcatggagctgccagatgatctgtgggtcaggcctaaaagctgtgtgccttgcagtccagtcaatagggataggagactccagcattgtggttgcaggaggcatggaaaatatgagcaaggctcctcacttggcttacttgagaacaggagtaaagataggtgagatgccactgactgacagtatactctgtgatggtcttacagatgcatttcacaactgtcatatgggtattacagctgaaaatgtagccaaaaaatggcaagtgagtagagaagatcaggacaaggttgcagttctgtcccagaacaggacagagaatgcacagaaagctggccattttgacaaanagattgtaccagttttnggngtcaactagaaaaaggtcttattgnagttaaaacagatgagttnccncgcca

SEQ ID NO: 228 - DNA, 964 bp, Homo Sapiens
tgagaggatcgcatcaccatcaccatcacggatcctatttaggtgacactatagaatcgtcgacccacgcgtccgggggcgcggcctccggcggaggagggaacagctgggacctcccgggttcccacgtgcggctgccggggcgtgcacagtctgggacccgtggcggtgctggcaacacaagcaccagctgcggggactccaacagcatctgcccggccccctccacgatgtccaaggccgaggaggccaagaagctggcgggccgcgcggctgtggagaaccacgtgaggaataaccaagtgctgggaattggaagtggttctacaattgtccatgctgtgcagcgaatagctgaaagggtgaagcaagagaatctgaacctcgtctgtattcccacttccttccaggcccgccagctcatcctgcagtatggcttgaccctcagtgatctggatcgacacccagagatcgaccttgccatcgatggtgctgatgaagtagatgctgatctcaatctcatcaagggtggcggaggctgcctgacccaggagaagattgtggctggctatgctagtcgcttcatcgtgatcgctgatttcaggaaagattcgaagaatctcggggatcagtggcacaagggaatccccatcgaggtcatcccaatggcctatgtcccagtgagccgagctgtgagccagaagtttgggggcgtggttgaacttcgaatggctgtcaacaaggctggtcctgtggtgacagataatgggaattttatcttggactggaagtttgaccgggtacacaaatggagtgaagtgaatacagctatcaaaatgatcccaggtgtggtggacacaggcctattcatcaacatggctgagagagtctactttgggatgcaggatggctcagtgaacatgacggagaagcctttctgttgaccctgcaaggagcagagtgt

SEQ ID NO: 229 - DNA, 1320 bp, Homo Sapiens
  misc_feature (11)..(11): n is a, c, g, or t
  misc_feature (773)..(773): n is a, c, g, or t
  misc_feature (915)..(915): n is a, c, g, or t
aggcacacccnctaagaatactagagaggatgcatcacatcaccatcacggtcgacccacgcgtccgggaggaggcaggaaccggagcgcgagcagtagctgggtgggcaccatggctgggatcaccaccatcgaggcggtgaagcgcaagatccaggttctgcagcagcaggcagatgatgcagaggagcgagctgagcgcctccagcgagaagttgagggagaaaggcgggcccgggaacaggctgaggctgaggtggcctccttgaaccgtaggatccagctggttgaagaagagctggaccgtgctcaggagcgcctggccactgccctgcaaaagctggaagaagctgaaaaagctgctgatgagagtgagagaggtatgaaggttattgaaaaccgggccttaaaagatgaagaaaagatggaactccaggaaatccaactcaaagaagctaagcacattgcagaagaggcagataggaagtatgaagaggtggctcgtaagttggtgatcattgaaggagacttggaacgcacagaggaacgagctgagctggcagagtcccgttgccgagagatggatgagcagattagactgatggaccagaacctgaagtgtctgagtgctgctgaagaaaagtactctcaaaaagaagataaatatgaggaagaaatcaagattcttactgataaactcaaggaggcagagacccgtgctgagtttgctgagagatcggtagccaagctggaaaagacaattgatgacctgnaagagcgtctctacagccaacttgagcgaaaccgcctgctttctaatgagctgaagctaacgctgcatgatctgtgtgactgatgggcagggctcaatgatgcccattaaactgagcttactgctcacaccactgacctggnaccccacaaaaagctgattggtcttttaaaagttattattttgccctgagcaaatgcattttatttgggcagttaaaatggtgattcctacagcatgggaagtgaccattggagatttcctgccctttaaaaaaattatggggaaaaaaggagggcccgaaaaattaaaggaaaaattgcgaaaatttggtttcccccttattgcggcccttccctgggcactaaaggaaaatatgtcccctgcgggagagtttaacaaaaagggcgctttgaacacaaactacacccctcctaccatttaagggggggcccacacccgggaccaccaaaacggacctcccccctctaaaaacactcacaacccaaatcccccgttctatccacacttagtctcccagagtatta

SEQ ID NO: 230 - DNA, 1136 bp, Homo Sapiens
  misc_feature (9)..(9): n is a, c, g, or t
  misc_feature (764)..(764): n is a, c, g, or t
  misc_feature (836)..(836): n is a, c, g, or t
  misc_feature (859)..(859): n is a, c, g, or t
  misc_feature (917)..(917): n is a, c, g, or t
  misc_feature (944)..(944): n is a, c, g, or t
  misc_feature (952)..(952): n is a, c, g, or t
  misc_feature (962)..(962): n is a, c, g, or t
  misc_feature (964)..(964): n is a, c, g, or t
  misc_feature (968)..(968): n is a, c, g, or t
  misc_feature (974)..(974): n is a, c, g, or t
  misc_feature (985)..(985): n is a, c, g, or t
  misc_feature (990)..(990): n is a, c, g, or t
  misc_feature (993)..(993): n is a, c, g, or t
  misc_feature (996)..(996): n is a, c, g, or t
  misc_feature (1000)..(1000): n is a, c, g, or t
  misc_feature (1007)..(1007): n is a, c, g, or t
  misc_feature (1019)..(1019): n is a, c, g, or t
  misc_feature (1049)..(1049): n is a, c, g, or t
  misc_feature (1052)..(1052): n is a, c, g, or t
  misc_feature (1060)..(1060): n is a, c, g, or t
  misc_feature (1068)..(1068): n is a, c, g, or t
  misc_feature (1079)..(1079): n is a, c, g, or t
  misc_feature (1089)..(1089): n is a, c, g, or t
  misc_feature (1118)..(1120): n is a, c, g, or t
  misc_feature (1124)..(1125): n is a, c, g, or t
  misc_feature (1129)..(1129): n is a, c, g, or t
  misc_feature (1136)..(1136): n is a, c, g, or t
tagagaaanttactatgagaggatcgcatcaccatcaccatcacggatcctatttaggtgacactatagaatcgtcgacccacgcgtccgctcgctgcaaaggctctgagccccaggttgggcccatcccagaggcagcaggtagcagtgagctgcaggttgggcccatcccagaaggaggcagcaacaagccccagcacatggcagaggaggggccggggcaagcagaagtcgagaagctccaggaagaacttaaagtggagcccctggaggaagtggccagggtgaaagaagaggtgtgggaggagaccactgtgaagggggaggagatagagcccaggctggagactgccgagaagggctgccagactgaagccagctctgagcggcccttcagctgcgaggtgtgtggccgatcctacaagcacgccggcagcctcatcaaccaccggcagagccaccagaccggccactttggctgtcaggcctgctccaagggcttctcaaacctcatgtccctcaagaaccaccggcgcatccatgcagatccccgacgtttccgctgcagcgagtgtgggaaggccttccgcctgcggaaacagctggccagccaccagcgggtccacatggaacggcgtgggggtgggggcacccgaaaggcgactcgggaagatcggcccttccgctgtgggcagtgcgggcggacctatcgccacgccggcagcctcctgaaccaccggcgcagccacgagacgggccagtanagctgccccacctgccccaagacctactccaaccgcatggccctgaaggaccaccagaagctgcactcaaanaatcggcggcgacgggcctgganggtccaggcgcacagctgtgcgttgcgccctctgtggccgcaccttccctggccgggnatttttggagcggcccctgcgggaacntgaggganacaaaaaggnanccanccaatngccagggaagncttgnatnggnacancgcccanttgaggcgaacntgattggcaacccagggaataaaaaaccanttngggtgggngcttgaanccattaccccncttttggaanaatggaattccccaagccaaggggaagcnnnaatnnaaanccctttn

SEQ ID NO: 231 - DNA, 956 bp, Homo Sapiens
  misc_feature (893)..(893): n is a, c, g, or t
  misc_feature (908)..(908): n is a, c, g, or t
  misc_feature (919)..(919): n is a, c, g, or t
  misc_feature (935)..(935): n is a, c, g, or t
  misc_feature (939)..(939): n is a, c, g, or t
  misc_feature (943)..(943): n is a, c, g, or t
  misc_feature (951)..(951): n is a, c, g, or t
tagagaaattactatgagaggatcgcatcaccatcaccatcacggatcctatttaggtgacactatagaatcgtcgacccacgcgtccggtgctacagcagctcagcagggtggatatgagatcccagcaaggttgcggacgttgcacaacctggtgatccagtacgcagcccaaggtcgctatgaggtggccgtgccactctgtaagcaggcactagaggacctggagcgcacatcaggccgtggccaccctgatgtcgccaccatgctcaacatccttgctttggtgtatcgtgaccagaataagtataaggaagctgcccacctgctgaatgatgcccttagcatccgggagagcaccttgggacctgaccatcctgctgtggctgccacactcaacaatttggctgtgctctatggcaaaaggggcaagtacaaggaggcagagcctctgtgccagcgggcactggagattcgagaaaaggtcctgggcacgaatcatccagatgtggcaaaacagctgaacaacctggccctcttgtgccaaaaccagggcaagtatgaggccgtggaacgctactaccagcgagcactggccatctacgaggggcagctggggccggacaaccctaatgtagcccggaccaagaacaacctggcttcctgttacctgaaacagggcaaatatgctgaggctgagacactatacaaagagatcctgacccgtgcccatgtacaggagtttgggtctgtggatgatgaccacaagcccatctggatgcatgcagaggagcgggaggaaatgagcaaaagccggcaccatggagggtgggacaccctatgctgagtatggaggctggtacaaggcctgcaaagtgagcagcccccacagngaacactactctganaaacctgggancttttgtataggcgcnaggnaaanctggaggntgctg

SEQ ID NO: 232 - DNA, 1422 bp, Homo Sapiens
  misc_feature (1354)..(1354): n is a, c, g, or t
agagatactatgagaggatcgcatcaccatcaccatcacggtcgacccacgcgtccgccgggagctaactaccgcgccggggccggggccggggccggggcccgacgtccccgcggggcccgggaccgcgaggaggacggcgggggcctggagcccgcggccgtggcccgcgacctattgaggggcacatctaacatgtcatttgaggagctgttggaattgcagagccaagtggggactaagacgtacaaacaattggtagctggaaatagtcctaagaaacaagcttctagaccacctatccaaaatgcatgtgttgcagataagcacaggcctctggaaatgtcagccaagatccgagtaccatttttacgtcaggttgttcccattagtaaaaaggtagcccgggaccctcgctttgatgatctgtcaggggaatataatcctgaggtgtttgacaaaacataccaattcttgaatgacatccgagcgaaagagaaagagcttgtgaaaaaacagttgaagaagcacctttcaggagaggagcatgagaaactgcagcaactgcttcagcgaatggagcagcaagaaatggcacagcaggaacgaaagcaacagcaggagctgcacctggccctgaagcaagaacgtcgggctcaggcccagcagggccatcggccatacttcctgaaaaaatctgagcagcgccagttggcactagctgagaagttcaaggagctgaaacgcagcaagaaattggagaacttcttgagtcgaaagaggcgacgaaatgcaggcaaggacaggagacatctccctttgagcaagagtaataaggaactatcctctgctctgccactgccccagggagacatggatctgtgaggacagatttgcccacgcctggtttccgttcagggcaagaacccagctgcccctgaatctcttggcctcaaaaagactagaaggctcttgaactatccctaggcttaccaaaaaaattcaatcctttgccatgcccccaacctccacttgaatcgggtaatttggtccccggatcctcttcatccttgccttaacaaggattttataccaaaaaaaggcccatcaaacctgaagccgttctgactccacgctgaccatttacatgcccctccaacatttcttccccttcttaaaaaaaaaaataagatcctcctctcccccctaccagacccatctgttccgtctaacctctcacctcctatcctctattctcccacaccccccctccctttttcttaaacacttcatttacattcaacactaccatttacaaactcactcccgtcactcctcctcaacttcttcatanctccagccattacctccttctaccttccgaactccattcccttctactcttatcctcttaactgctca

SEQ ID NO: 233 - DNA, 978 bp, Homo Sapiens
taactatgagaggatcgcatcaccatcaccatcacggatcctatttaggtgacactatagaatcgtcgacccacgcgtccggcagctcagagccagaggagtggtgcccgccaatgcctgagagaagtcacctgacggagcccagctccagtggagggtgcctggtcaccccatcccgaagggaaaccccctctcccacaccttcctatggacagcagtccacagccactcttacaccctcacctcctgaccctccccagcccccaactgacatgccccatctccatcagatgcccaggagggtgccccttgggccgagttcccctctcagtgtatcccagcccatgctgggcatccgtgaagcgaggcctgctggcttgggtgctggccctgcagcctcaccccacctcagccccagtcctgcccctagcacagccagcagtgccccaggcagaacctggcaggggaatggggagatgactcccccacttcaaggaccccgtgctcgattccggaagaaacccaaggctcttccctacaggagggagaacagtcctggggacttgcccccaccacccttgccaccgccagaggaagaggcgagctgggccctagagctgagggcagcaggcagcatgtcctccctggagcgggagcgcagtggggagaggaaagcggtccaggccgtgcccctggcagcccagcgggtgctccacccagatgaagaggcctggctcccatacagcagaccaagcttcctgtcccggggccagggcaccagcacatgttccacggccggcagcaactcttccaggggctccagcagctctaggggctcccggggccctggccggagccggagtcggagtcagagccggagccagagccaaagggccaggacagaaacgccgagaggaaccaagatgacccttgttggggcattgagaatatcatgagtgccacggggaaggggagtag

SEQ ID NO: 234 - DNA, 1223 bp, Homo Sapiens
  misc_feature (903)..(903): n is a, c, g, or t
  misc_feature (919)..(919): n is a, c, g, or t
  misc_feature (922)..(922): n is a, c, g, or t
  misc_feature (930)..(930): n is a, c, g, or t
  misc_feature (937)..(937): n is a, c, g, or t
  misc_feature (958)..(958): n is a, c, g, or t
  misc_feature (970)..(970): n is a, c, g, or t
  misc_feature (973)..(973): n is a, c, g, or t
  misc_feature (978)..(978): n is a, c, g, or t
  misc_feature (988)..(988): n is a, c, g, or t
  misc_feature (999)..(999): n is a, c, g, or t
  misc_feature (1001)..(1001): n is a, c, g, or t
  misc_feature (1004)..(1004): n is a, c, g, or t
  misc_feature (1006)..(1006): n is a, c, g, or t
  misc_feature (1009)..(1009): n is a, c, g, or t
  misc_feature (1011)..(1011): n is a, c, g, or t
  misc_feature (1017)..(1017): n is a, c, g, or t
  misc_feature (1023)..(1023): n is a, c, g, or t
  misc_feature (1025)..(1025): n is a, c, g, or t
  misc_feature (1039)..(1039): n is a, c, g, or t
  misc_feature (1052)..(1052): n is a, c, g, or t
  misc_feature (1087)..(1087): n is a, c, g, or t
  misc_feature (1105)..(1105): n is a, c, g, or t
  misc_feature (1115)..(1115): n is a, c, g, or t
  misc_feature (1119)..(1119): n is a, c, g, or t
  misc_feature (1133)..(1134): n is a, c, g, or t
  misc_feature (1138)..(1138): n is a, c, g, or t
  misc_feature (1144)..(1144): n is a, c, g, or t
  misc_feature (1151)..(1151): n is a, c, g, or t
  misc_feature (1173)..(1174): n is a, c, g, or t
  misc_feature (1183)..(1183): n is a, c, g, or t
  misc_feature (1186)..(1186): n is a, c, g, or t
  misc_feature (1191)..(1191): n is a, c, g, or t
  misc_feature (1195)..(1195): n is a, c, g, or t
  misc_feature (1200)..(1200): n is a, c, g, or t
  misc_feature (1217)..(1217): n is a, c, g, or t
  misc_feature (1221)..(1222): n is a, c, g, or t
tagagaaattactatgagaggatcgcatcaccatcaccatcacggatcctatttaggtgacactatagaatcgtcgacccacgcgtccgatgaaattgaagaaatgggtggaatggccaaagctgtagctgagggaatacctaaacttcgaattgaagaatgtgctgcccgaagacaagctagaatagattctggttctgaagtaattgttggagtaaataagtaccagttggaaaaagaagacgctgtagaagttctggcaattgataatacttcagtgcgaaacaggcagattgaaaaacttaagaagatcaaatccagcagggatcaagctttggctgaacgttgtcttgctgcactaaccgaatgtgctgctagcggagatggaaatatcctggctcttgcagtggatgcatctcgggcaagatgtacagtgggagaaatcacagatgccctgaaaaaggtatttggtgaacataaagcgaatgatcgaatggtgagtggagcatatcgccaggaatttggagaaagtaaagagataacatctgctatcaagagggttcataaattcatggaacgtgaaggtcgcagacctcgtcttcttgtagcaaaaatgggacaagatggccatgacagaggagcaaaagttattgctacaggatttgctgatcttggttttgatgtggacataggccctcttttccagactcctcgtgaagtggcccagcaggctgtggatgcggatgtgcatgctgtgggcgtaagcaccctcgctgctggtcataaaaccctagttcctgaactcatcaaagaacttaactcccttggacggccagatattcttgtcatgtgtggaggggtgataccacctcaggattatgaatttctgtttgaagttggtgnttccaatgtatttggnccngggactcnaattccnaaggctgccgttcaggtgctngatgatattganaantgttnggaaaaaaancaccaatctgnanaananccncnttttgnttttancntttggcccaaaaanttatttttagttntgatccaagaaaaaaagtaaagcctttgtccttcnattttaatttccaaaccnggatttggancttnccttgaaagccttnncttnaaaaanccttacntttaggcccgggggccccgccnnaaaaattgnacntaccngttnccctnccaaaaaaaaaaaaaancccnna

SEQ ID NO: 235 - DNA, 1062 bp, Homo Sapiens
  misc_feature (927)..(927): n is a, c, g, or t
  misc_feature (936)..(936): n is a, c, g, or t
  misc_feature (941)..(941): n is a, c, g, or t
  misc_feature (947)..(947): n is a, c, g, or t
  misc_feature (957)..(957): n is a, c, g, or t
  misc_feature (969)..(969): n is a, c, g, or t
  misc_feature (976)..(976): n is a, c, g, or t
  misc_feature (1005)..(1005): n is a, c, g, or t
  misc_feature (1013)..(1013): n is a, c, g, or t
  misc_feature (1019)..(1019): n is a, c, g, or t
  misc_feature (1027)..(1027): n is a, c, g, or t
  misc_feature (1034)..(1034): n is a, c, g, or t
  misc_feature (1038)..(1038): n is a, c, g, or t
  misc_feature (1040)..(1041): n is a, c, g, or t
  misc_feature (1047)..(1047): n is a, c, g, or t
  misc_feature (1052)..(1052): n is a, c, g, or t
  misc_feature (1056)..(1056): n is a, c, g, or t
  misc_feature (1061)..(1062): n is a, c, g, or t
aatagagagattactatgagaggatcgcatcaccatcaccatcacggatcctatttaggtgacactatagaatcgtcgacccacgcgtccgctatttgtgcagagtttgccatcctgcgaatgctgctgcagagctcggaggggcgctgtgtgtacatcacccccatggaggccctggcagagcaggtatacatggactggtacgagaagttccaggacaggctcaacaagaaggtggtactcctgacaggcgagaccagcacagacctgaagctgctgggcaaagggaacattatcatcagcacccctgagaagtgggacatactttcccggcgatggaagcagcgcaagaacgtgcagaacatcaacctcttcgtggtggatgaggtccaccttatcgggggcgagaatgggcctgtcttagaagtgatctgctcccgaatgcgctacatctcctcccagattgagcggcccattcgcattgtggcactcagctcttcgctctccaatgccaaggatgtggcccactggctgggctgcagtgccacctccaccttcaacttccatcccaatgtgcgtcccgtccccttggagctgcacatccagggcttcaacatcagccatacacaaacccgcctgctctccatggccaagcctgtgtaccatgctatcaccaagcactcgcccaagaagcctgtcattgtctttgtgccgtctcgcaagcagacccgcctcactgccattgacatcctcaccacctgtgcagcagacatccaacggcagaggttcttgcactgcaccgagaaggatctgattccgtacctggagaagctaaagtgacagcacgctcaaggaaaaccctgctaaatggggtgggctacctgcatgaggggctcacccccatggagcgacgcctggtggaaccancctcttcanctcangggctntccaggtggnggtggcttctcngaaatcnctgctggggcattgaacgtggcttgcccnccctggtnatcatncatggaanaccccantaantnnaatggncaaantccnccccnn

SEQ ID NO: 236 - DNA, 1027 bp, Homo Sapiens
  misc_feature (104)..(104): n is a, c, g, or t
  misc_feature (112)..(112): n is a, c, g, or t
  misc_feature (378)..(378): n is a, c, g, or t
  misc_feature (573)..(573): n is a, c, g, or t
  misc_feature (592)..(592): n is a, c, g, or t
  misc_feature (616)..(616): n is a, c, g, or t
  misc_feature (618)..(618): n is a, c, g, or t
  misc_feature (635)..(636): n is a, c, g, or t
  misc_feature (690)..(690): n is a, c, g, or t
  misc_feature (697)..(697): n is a, c, g, or t
  misc_feature (699)..(699): n is a, c, g, or t
  misc_feature (702)..(702): n is a, c, g, or t
  misc_feature (720)..(720): n is a, c, g, or t
  misc_feature (734)..(734): n is a, c, g, or t
  misc_feature (736)..(736): n is a, c, g, or t
  misc_feature (751)..(751): n is a, c, g, or t
  misc_feature (777)..(777): n is a, c, g, or t
  misc_feature (794)..(794): n is a, c, g, or t
  misc_feature (799)..(799): n is a, c, g, or t
  misc_feature (804)..(804): n is a, c, g, or t
  misc_feature (809)..(809): n is a, c, g, or t
  misc_feature (817)..(817): n is a, c, g, or t
  misc_feature (821)..(821): n is a, c, g, or t
  misc_feature (835)..(835): n is a, c, g, or t
  misc_feature (843)..(843): n is a, c, g, or t
  misc_feature (847)..(847): n is a, c, g, or t
  misc_feature (865)..(865): n is a, c, g, or t
  misc_feature (871)..(871): n is a, c, g, or t
  misc_feature (894)..(894): n is a, c, g, or t
  misc_feature (905)..(905): n is a, c, g, or t
  misc_feature (923)..(923): n is a, c, g, or t
  misc_feature (935)..(935): n is a, c, g, or t
  misc_feature (937)..(937): n is a, c, g, or t
  misc_feature (939)..(942): n is a, c, g, or t
  misc_feature (948)..(948): n is a, c, g, or t
  misc_feature (956)..(956): n is a, c, g, or t
  misc_feature (958)..(960): n is a, c, g, or t
  misc_feature (973)..(973): n is a, c, g, or t
  misc_feature (981)..(981): n is a, c, g, or t
  misc_feature (993)..(993): n is a, c, g, or t
  misc_feature (1009)..(1009): n is a, c, g, or t
  misc_feature (1021)..(1021): n is a, c, g, or t
  misc_feature (1024)..(1024): n is a, c, g, or t
aatagagaaattactatgagaggatcgcatcaccatcaccatcacggtatcctatttaggtgacactatagaatcgtcgacccacgcgttccgcccacgcgtcnggtacgcntccccacgaggggctggttcctgaaaggatgtacagaggatccccaaccgcctgcgaaacccaagccgccgcgtaggagcgtgcgttcgggccctcttctcccacctgttcgactccccatccccaggatgtcaacctcagtccctcaaggccatacctggacccaacgggtgaagaaagacgatgaggaggaggacccgctggaccagctgatctcccgctctggctgtgctgcctcccactttgcagtgcaggagtgcatggcncagcaccaggactggcggcaatgccagccacaggtgcaggcgttcaaggattgcatgagtgaacagcaggcgaggcggcaagaggagctgcagaggaggcaagaacaagccggtgcccaccactgagaccccaaaccacctatccccagtagatggccctgccaagaccaacacccagcaagattatagaggaanaaatcctaaatgctggtgngggaggtctaaaacatagggagtnancatggggtgggtcacannaacgtatttgatcaggcaaagaggaaatcttgccatccaagcctgttccctccngataaangnggntaattcttatgtcataancccatataaatgangnaatgaaacatacgtnactattaataaaaaagtgtttaaaanttattgggcaatttaantgaanacatnctggnttccatancctnctctcattcccaantgagggtnctanccttcacatccctagttnaccccnatgaactaagctttggtgacttnggaacaatttnttttaaaatccccaagantctgtttttttncntnnnnaaaaantggcatanannnataacttttttcnaaagcctncaaaaacaaaanaaatgggctttccctnattagggatttnttnaaa

SEQ ID NO: 237 - DNA, 1089 bp, Homo Sapiens
  misc_feature (824)..(824): n is a, c, g, or t
  misc_feature (855)..(855): n is a, c, g, or t
  misc_feature (857)..(857): n is a, c, g, or t
  misc_feature (886)..(886): n is a, c, g, or t
  misc_feature (919)..(919): n is a, c, g, or t
  misc_feature (933)..(933): n is a, c, g, or t
  misc_feature (944)..(945): n is a, c, g, or t
  misc_feature (962)..(962): n is a, c, g, or t
  misc_feature (966)..(966): n is a, c, g, or t
  misc_feature (985)..(986): n is a, c, g, or t
  misc_feature (990)..(990): n is a, c, g, or t
  misc_feature (1011)..(1011): n is a, c, g, or t
  misc_feature (1025)..(1025): n is a, c, g, or t
  misc_feature (1027)..(1027): n is a, c, g, or t
  misc_feature (1030)..(1030): n is a, c, g, or t
  misc_feature (1035)..(1035): n is a, c, g, or t
  misc_feature (1037)..(1037): n is a, c, g, or t
  misc_feature (1045)..(1045): n is a, c, g, or t
  misc_feature (1047)..(1047): n is a, c, g, or t
  misc_feature (1054)..(1054): n is a, c, g, or t
  misc_feature (1061)..(1061): n is a, c, g, or t
  misc_feature (1065)..(1065): n is a, c, g, or t
  misc_feature (1071)..(1071): n is a, c, g, or t
  misc_feature (1075)..(1075): n is a, c, g, or t
  misc_feature (1078)..(1078): n is a, c, g, or t
  misc_feature (1084)..(1084): n is a, c, g, or t
  misc_feature (1088)..(1089): n is a, c, g, or t
tagagaaattactatgagaggatcgcatcaccatcaccatcacggatcctatttaggtgacactatagaatcgtcgacccacgcgtccgcagcctattcttcctacaaggccgtgaagacaaaaaacgtgaaggaatatgtgaaatggatgatgtactggatcgtctttgccttcttcaccacggccgagacgctcacggatatagtgctctcctggttccccttctactttgaactgaagatcgccttcgtgatatggctgctgtccccttacaccaagggctccagcgtgctctaccgcaagttcgtgcacccaacgctgtccaacaaggagaaggagatcgacgagtacatcacgcaggcccgagacaagagctatgagaccatgatgagggtgggcaagaggggcctgaaccttgccgccaatgctgcagtcacagctgccgccaagggccagggggtgctgtcagagaagctccgcagcttcagcatgcaggacctgaccctgatccgggacgaggacgcactgcccctgcagaggcctgacggccgcctccgacccagccctggcagcctcctggacaccatcgaggacttaggagatgaccctgccctgagtctaaggtccagcacaaacccggcagattcccggacagaggcttctgaggatgacatgggagacaaagctcccaagagggccaaacccatcaaaaaagcgcccaaagctgagccactggcttccaagacactgaagacccggcccaagaagaagacctctggcgggggcgactcagcttgagcccctccacccccgcaggctgcanagcaaggatgaagcctcaggaggggcctcananccagcccctgctccacactgtgccagtancctaggtgtctcaggcccctgggccccgcaaanggccattttccggngcctgccccannggccactcttctggaangggntttggaaaaaaaaaatgcnngaanccgcgggggctccccggttcnttgggaaaaagggngnccntttgnancttttggnantgggaanaaccaanaaanccaaantctnggnccctcnaaann

SEQ ID NO: 238 - DNA, 1261 bp, Homo Sapiens
  misc_feature (1)..(1): n is a, c, g, or t
  misc_feature (3)..(3): n is a, c, g, or t
  misc_feature (790)..(790): n is a, c, g, or t
  misc_feature (949)..(949): n is a, c, g, or t
  misc_feature (992)..(992): n is a, c, g, or t
  misc_feature (1006)..(1006): n is a, c, g, or t
  misc_feature (1017)..(1017): n is a, c, g, or t
  misc_feature (1031)..(1031): n is a, c, g, or t
  misc_feature (1050)..(1050): n is a, c, g, or t
  misc_feature (1057)..(1057): n is a, c, g, or t
  misc_feature (1059)..(1059): n is a, c, g, or t
  misc_feature (1062)..(1062): n is a, c, g, or t
  misc_feature (1064)..(1064): n is a, c, g, or t
  misc_feature (1070)..(1070): n is a, c, g, or t
  misc_feature (1092)..(1092): n is a, c, g, or t
  misc_feature (1099)..(1099): n is a, c, g, or t
  misc_feature (1107)..(1107): n is a, c, g, or t
  misc_feature (1120)..(1120): n is a, c, g, or t
  misc_feature (1123)..(1124): n is a, c, g, or t
  misc_feature (1129)..(1129): n is a, c, g, or t
  misc_feature (1141)..(1142): n is a, c, g, or t
  misc_feature (1157)..(1157): n is a, c, g, or t
  misc_feature (1168)..(1168): n is a, c, g, or t
  misc_feature (1172)..(1172): n is a, c, g, or t
  misc_feature (1177)..(1177): n is a, c, g, or t
  misc_feature (1183)..(1183): n is a, c, g, or t
  misc_feature (1189)..(1190): n is a, c, g, or t
  misc_feature (1203)..(1203): n is a, c, g, or t
  misc_feature (1211)..(1211): n is a, c, g, or t
  misc_feature (1213)..(1213): n is a, c, g, or t
  misc_feature (1215)..(1215): n is a, c, g, or t
  misc_feature (1217)..(1217): n is a, c, g, or t
  misc_feature (1220)..(1220): n is a, c, g, or t
  misc_feature (1222)..(1222): n is a, c, g, or t
  misc_feature (1236)..(1236): n is a, c, g, or t
  misc_feature (1238)..(1238): n is a, c, g, or t
  misc_feature (1240)..(1240): n is a, c, g, or t
  misc_feature (1246)..(1246): n is a, c, g, or t
ntntagagaaattactatgagaggatcgcatcaccatcaccatcacggatcctatttaggtgacactatagaatcgtcgacccacgcgtccgctgagatgagcaacctggacctaaccaagattctgtccaagaaatacaaggagcttccggagaagaagaagatgaaatatattcaggacttccagagagagaaacaggagttcgagcgaaacctggcccgattcagggaggatcaccccgacctaatccagaatgccaagaaatcggacatcccagagaagcccaaaaccccccagcagctgtggtacacccacgagaagaaggtgtatctcaaagtgcggccagatgccactacgaaggaggtgaaggactccctggggaagcagtggtctcagctctcggacaaaaagaggctgaaatggattcataaggccctggagcagcggaaggagtacgaggagatcatgagagactatatccagaagcacccagagctgaacatcagtgaggagggtatcaccaagtccaccctcaccaaggccgaacgccagctcaaggacaagtttgacgggcgacccaccaagccacctccgaacagctactcgctgtactgcgcagagctcatggccaacatgaaggacgtgcccagcacagagcgcatggtgctgtgcagccagcagtggaagctgctgtcccagaaggagaaggacgcctatcacaagaagtgtgatcagaaaaagaaagattacgaggtggagctgctccgtttcctcgagagcctgcctgangaggagcagcagcgggtcttggggggaagagaagatgctgaacatcaacaagaagcaggccaccagccccgcctccaagaagccagcccaggaaggggcaagggcggctccgagaagcccaagcggcccgtgtcggccatgttcatcttctcggagganaaacggcggcagctgcaaggaggagcggcctgagctctccganagcgagctgacccncctgctggccnaatgtggaacgacntgtctgaaaaaaaaaggcnagtacangnccnanaggcgnccctcaagctcatccgaaaagnaacccgncgggaacncaagaacgggcanctnncccantcccccaaaaanntgagaatttggcaanaaacgtttcgngatncctgncccttnaaaatnncgggggaggcttnaaccctgnantncnggnanacttggaaaaaggnantntttttnttaaaggcccccaaa

SEQ ID NO: 239 - DNA, 1253 bp, Homo Sapiens
  misc_feature (5)..(5): n is a, c, g, or t
  misc_feature (7)..(7): n is a, c, g, or t
  misc_feature (933)..(933): n is a, c, g, or t
  misc_feature (949)..(949): n is a, c, g, or t
  misc_feature (1032)..(1032): n is a, c, g, or t
  misc_feature (1132)..(1132): n is a, c, g, or t
  misc_feature (1170)..(1170): n is a, c, g, or t
  misc_feature (1196)..(1196): n is a, c, g, or t
  misc_feature (1210)..(1214): n is a, c, g, or t
  misc_feature (1225)..(1225): n is a, c, g, or t
  misc_feature (1245)..(1247): n is a, c, g, or t
  misc_feature (1251)..(1252): n is a, c, g, or t
gttcncncctaagagatactagagaggatcgcatcaccatcaccatcacggtcgacccacgcgtccggctgggcgaccggcgcgtcgtgcggggctgcggcggagcctccttaaggaaggtgcaagaggttggcagcttcgattgaagcacatcgaccggcgacagcagccaggagtcatgagcgacagcggcgagcagaactacggcgagcgggaatcccgttctgcttccagaagtggaagtgctcacggatcggggaaatctgcaaggcatacccctgcaaggtctcgctccaaggaagattccaggcgttccagatcaaagtccaggtcccgatctgaatctaggtctagatccagaagaagctcccgaaggcattatacccggtcacggtctcgctcccgctcccatagacgatcacgtagcaggtcttacagtcgagattatcgtagacggcacagccacagccattctcccatgtctactcgcaggcgtcatgttgggaatcgggcaaatcctgatcctaactgttgtcttggagtatttgggctgagcttgtacaccacagaaagagatctaagagaagtgttctctaaatatggtcccattgccgatgtgtctattgtatatgaccagcagtctaggcgttcaagaggatttgcctttgtatattttgaaaatgtagatgatgccaaggaagctaaagaacgtgccaatggaatggagcttgatgggcgtaggatcagagttgatttctctataacaaaaagaccacatacgccaacaccaggaatttacatggggagacctacctatggcagctctcgccgtcgggattactatgacagaggatatgatcggggctatgatgatcgggactactatagcagatcatacaaaggaggaagtggagaaggaagaggaatgaaaantgcccaaaacgggatnagatttataaaagggggtcccttctccttataatgtccggggagaaaccgaatccgttccaaaatccgatctatctccccccntcctattaagcattaaaattttctgaacctgccctaaacgtggaaaagtttgggggcaaattttttatgcccctgttaaaaaggaacaggcctacagaantagggcctttacccctttcaagacaacttttgcggagngaaacgcgctctttcgccttcggaancgggcctctccccnnnnnggttccaaaancctgtccccctttttccccnnnaccnnc

SEQ ID NO: 240 - DNA, 1145 bp, Homo Sapiens
  misc_feature (936)..(936): n is a, c, g, or t
  misc_feature (948)..(948): n is a, c, g, or t
  misc_feature (969)..(969): n is a, c, g, or t
  misc_feature (971)..(971): n is a, c, g, or t
  misc_feature (983)..(983): n is a, c, g, or t
  misc_feature (1009)..(1009): n is a, c, g, or t
  misc_feature (1015)..(1015): n is a, c, g, or t
  misc_feature (1042)..(1042): n is a, c, g, or t
  misc_feature (1059)..(1059): n is a, c, g, or t
  misc_feature (1068)..(1068): n is a, c, g, or t
  misc_feature (1072)..(1072): n is a, c, g, or t
  misc_feature (1084)..(1084): n is a, c, g, or t
  misc_feature (1090)..(1090): n is a, c, g, or t
  misc_feature (1097)..(1097): n is a, c, g, or t
  misc_feature (1103)..(1104): n is a, c, g, or t
  misc_feature (1106)..(1106): n is a, c, g, or t
  misc_feature (1110)..(1110): n is a, c, g, or t
  misc_feature (1117)..(1117): n is a, c, g, or t
  misc_feature (1128)..(1128): n is a, c, g, or t
  misc_feature (1133)..(1133): n is a, c, g, or t
  misc_feature (1141)..(1143): n is a, c, g, or t
agagaaattactatgagaggatcgcatcaccatcaccatcacggatcctatttaggtgacactatagaatcgtcgacccacgcgtccgcccacgcgtccgcccacgcgtccgcccacgcgtccgctcttgcaaacttgaccattccagacttagactgggaattggttcttaaagaatataagttggttccatacctcaaggataaactaaaaccaggtgctgcagaagatgatcttgttttagaagtggttataatgattggaactgtatccatggatgactcttgtgctgcattgctagccaaatctggcataatccctgcactcattgaattgctaaatgctcaacaagaagatgatgaatttgtgtgtcagataatttatgtcttctaccagatggttttccaccaagccacaagagacgtcataatcaaggaaacacaggctccagcatatctcatagacctaatgcatgataagaataatgaaatccgaaaggtctgtgataatacattagatattatagcggaatatgatgaagaatgggctaagaaaattcagagtgaaaagtttcgctggcataactctcagtggctggagatggtagagagtcgtcagatggatgagagtgagcagtacttgtatggtgatgatcgaattgagccatacattcatgaaggagatattctcgaaagacctgaccttttctacaactcagatggattaattgcctctgaaggagccataagtcccgatttcttcaatgattaccaccttcaaaatggagatgttgttgggcagcattcatttcctggcagccttggaatggatggctttggccaaccagttggcattcttggacgccctgccacagcatatggattccgccctgatgaaccttactactatggctatggatcttgataaagtatctgnttccatgtgtantctcagcttaaaaaaatctgngngggttgggttantttgggatctttgcctaataatgcangtggangtaatggggggccggggttggttttantttaaaaggtggtagcngcaaataancccngcccccctgtcntcggtnaagtacngtgganncngacnttgttcnccctcaacccnatctnggggctannnac

SEQ ID NO: 241 - DNA, 1173 bp, Homo Sapiens
  misc_feature (722)..(722): n is a, c, g, or t
  misc_feature (780)..(780): n is a, c, g, or t
  misc_feature (791)..(791): n is a, c, g, or t
  misc_feature (796)..(796): n is a, c, g, or t
  misc_feature (800)..(800): n is a, c, g, or t
  misc_feature (807)..(807): n is a, c, g, or t
  misc_feature (815)..(815): n is a, c, g, or t
  misc_feature (832)..(832): n is a, c, g, or t
  misc_feature (841)..(841): n is a, c, g, or t
  misc_feature (858)..(858): n is a, c, g, or t
  misc_feature (868)..(868): n is a, c, g, or t
  misc_feature (878)..(879): n is a, c, g, or t
  misc_feature (912)..(912): n is a, c, g, or t
  misc_feature (920)..(920): n is a, c, g, or t
  misc_feature (922)..(922): n is a, c, g, or t
  misc_feature (927)..(927): n is a, c, g, or t
  misc_feature (930)..(930): n is a, c, g, or t
  misc_feature (934)..(934): n is a, c, g, or t
  misc_feature (945)..(945): n is a, c, g, or t
  misc_feature (947)..(947): n is a, c, g, or t
  misc_feature (950)..(951): n is a, c, g, or t
  misc_feature (953)..(953): n is a, c, g, or t
  misc_feature (955)..(955): n is a, c, g, or t
  misc_feature (962)..(962): n is a, c, g, or t
  misc_feature (964)..(964): n is a, c, g, or t
  misc_feature (982)..(982): n is a, c, g, or t
  misc_feature (985)..(985): n is a, c, g, or t
  misc_feature (1008)..(1008): n is a, c, g, or t
  misc_feature (1026)..(1026): n is a, c, g, or t
  misc_feature (1032)..(1032): n is a, c, g, or t
  misc_feature (1035)..(1035): n is a, c, g, or t
  misc_feature (1039)..(1039): n is a, c, g, or t
  misc_feature (1046)..(1046): n is a, c, g, or t
  misc_feature (1050)..(1051): n is a, c, g, or t
  misc_feature (1061)..(1061): n is a, c, g, or t
  misc_feature (1069)..(1069): n is a, c, g, or t
  misc_feature (1078)..(1078): n is a, c, g, or t
  misc_feature (1081)..(1081): n is a, c, g, or t
  misc_feature (1083)..(1083): n is a, c, g, or t
  misc_feature (1089)..(1089): n is a, c, g, or t
  misc_feature (1098)..(1098): n is a, c, g, or t
  misc_feature (1101)..(1101): n is a, c, g, or t
  misc_feature (1114)..(1115): n is a, c, g, or t
  misc_feature (1124)..(1124): n is a, c, g, or t
  misc_feature (1138)..(1138): n is a, c, g, or t
  misc_feature (1141)..(1142): n is a, c, g, or t
  misc_feature (1149)..(1149): n is a, c, g, or t
  misc_feature (1153)..(1153): n is a, c, g, or t
  misc_feature (1164)..(1164): n is a, c, g, or t
  misc_feature (1166)..(1166): n is a, c, g, or t
attagagaaattactatgagaggatcgcatcaccatcaccatcacggatcctatttaggtgacactatagaatcgtcgacccacgcgtccgaaatggaagtgtgggatgtgaaaaactacaaacttatttctaaaccggtggcttctgattctacatattttgcttggtgcccggatggtgagcatattttaacagctacatgtgctcccaggttacgggttaataatggatacaaaatttggcattatactggctctatcttgcacaagtatgatgtgccatcaaatgcagaattatggcaggtttcttggcagccatttttggatggaatatttccagcaaaaacaataacttaccaagcagttccaagtgaagtacccaatgaggaacctaaagttgcaacagcttatagacccccagctttaagaaataaaccaatcaccaattccaaattgcatgaagaggaaccacctcagaatatgaaaccacaatcaggaaacgataagccattatcaaaaacagctcttaaaaatcaaaggaagcatgaagctaagaaagctgcaaagcaggaagcaagaagtgacaagagtccagatttggcacctactcctgccccacagagcacaccacgaaacactgtctctcagtcaatttctggggaccctgagatagacaaaaaaattccagaacctaaaggaagaaactgaaagcaatcgaacanctgaaagaacaagcagcaactggaaaacagctagaaaaaaatcagttgggaaaaaatncaaaaagaacngcccnttcnccagganctgggaanaatttggaattgggtantttaaaganttcccgggaaagcaagnttgatgaccnaaaaatccgnngcaaaccccctccttcgggtaaacccctttggnaaacccananaattnccngggnccccccttaangnccnncnanaattttnanccctttttcccaaaatcnccnaaaggggaaaaattttttaaaanggccctttaaaatggaantttttnccntggnccccccnaaanngggccaaaangggaaaanaaaaaaaanaancncggaanttttttacncancctggccaaattnnaaaaaaagngttctttttttttnggnnggggggnaatnaaccccggganangaaaaaa

SEQ ID NO: 242 - DNA, 1061 bp, Homo Sapiens
  misc_feature (1)..(1): n is a, c, g, or t
  misc_feature (4)..(4): n is a, c, g, or t
  misc_feature (822)..(822): n is a, c, g, or t
  misc_feature (881)..(881): n is a, c, g, or t
  misc_feature (889)..(889): n is a, c, g, or t
  misc_feature (966)..(966): n is a, c, g, or t
  misc_feature (988)..(988): n is a, c, g, or t
  misc_feature (1018)..(1018): n is a, c, g, or t
  misc_feature (1026)..(1026): n is a, c, g, or t
  misc_feature (1036)..(1037): n is a, c, g, or t
  misc_feature (1041)..(1061): n is a, c, g, or t
ntantagagaaattactatgagaggatcgcatcaccatcaccatcacggatcctatttaggtgacactatagaatcgtcgacccacgcgtccggggaagagtggtgtgggcaagacggcgctggtggccaagctggctggcctggaggtgcctgtggtgcaccacgagaccaccggcatccagaccaccgtggtattttggccagccaagctgcaggccagcagccgtgtcgtcatgtttcgttttgagttctgggactgtggagagtctgcactcaaaaagttcgatcatatgctgctggcttgcatggagaacacagatgccttcctcttcctcttctccttcactgaccgtgcctcctttgaagacctccctggacagctggcccgcatagcaggtgaggcccctggtgtcgtcaggatggtcatcggctccaaatttgaccagtacatgcacacggacgtgcccgagcgggacctcacagccttccggcaggcctgggagctgcccctgctacgggtgaagagtgtgccggggcggcggctggctgatgggcgcacactggacgggcgggctgggctggccgacgttgcccacatactcaatggccttgctgagcagctgtggcaccaggaccaggtggcggctggcctgcttcccaaccccccagagagtgctcctgaatgagtcacgagtggttgcctgtgatcccacccccaaccctcaggtctcgacatagggctggaggctggggcaggaacatggatcctatctggaggactggccagcatggcctgatcagggaggatgtggccagaaaangcccacccgcgagcagcgctttccttgcaaaattcatggcagggaggtggggaaccaangccctganctcgaacatctcccgtggcctttccccctttggcagcaccgatgaagatgactgggaaaaggggtgcctctcaagtnacttcaatcaaaaacctgtatnggttgaggtgaaaccatctgttgtaaaaanaaaccccnaattcccaannaaannnnnnnnnnnnnnnnnnnnn

SEQ ID NO: 243 - DNA, 1354 bp, Homo Sapiens
  misc_feature (892)..(892): n is a, c, g, or t
  misc_feature (900)..(900): n is a, c, g, or t
  misc_feature (905)..(905): n is a, c, g, or t
  misc_feature (907)..(907): n is a, c, g, or t
  misc_feature (924)..(924): n is a, c, g, or t
  misc_feature (928)..(928): n is a, c, g, or t
  misc_feature (934)..(934): n is a, c, g, or t
  misc_feature (952)..(952): n is a, c, g, or t
  misc_feature (986)..(986): n is a, c, g, or t
  misc_feature (995)..(995): n is a, c, g, or t
  misc_feature (999)..(999): n is a, c, g, or t
  misc_feature (1019)..(1019): n is a, c, g, or t
  misc_feature (1039)..(1039): n is a, c, g, or t
  misc_feature (1046)..(1046): n is a, c, g, or t
  misc_feature (1050)..(1050): n is a, c, g, or t
  misc_feature (1073)..(1073): n is a, c, g, or t
  misc_feature (1084)..(1084): n is a, c, g, or t
  misc_feature (1087)..(1087): n is a, c, g, or t
  misc_feature (1090)..(1090): n is a, c, g, or t
  misc_feature (1093)..(1093): n is a, c, g, or t
  misc_feature (1097)..(1097): n is a, c, g, or t
  misc_feature (1103)..(1103): n is a, c, g, or t
  misc_feature (1116)..(1116): n is a, c, g, or t
  misc_feature (1119)..(1119): n is a, c, g, or t
  misc_feature (1124)..(1124): n is a, c, g, or t
  misc_feature (1137)..(1137): n is a, c, g, or t
  misc_feature (1140)..(1140): n is a, c, g, or t
  misc_feature (1143)..(1143): n is a, c, g, or t
  misc_feature (1151)..(1151): n is a, c, g, or t
  misc_feature (1155)..(1155): n is a, c, g, or t
  misc_feature (1159)..(1159): n is a, c, g, or t
  misc_feature (1165)..(1165): n is a, c, g, or t
  misc_feature (1169)..(1169): n is a, c, g, or t
  misc_feature (1172)..(1172): n is a, c, g, or t
  misc_feature (1184)..(1184): n is a, c, g, or t
  misc_feature (1188)..(1188): n is a, c, g, or t
  misc_feature (1194)..(1195): n is a, c, g, or t
  misc_feature (1201)..(1201): n is a, c, g, or t
  misc_feature (1215)..(1215): n is a, c, g, or t
  misc_feature (1231)..(1231): n is a, c, g, or t
  misc_feature (1237)..(1237): n is a, c, g, or t
  misc_feature (1248)..(1248): n is a, c, g, or t
  misc_feature (1253)..(1253): n is a, c, g, or t
  misc_feature (1264)..(1264): n is a, c, g, or t
  misc_feature (1285)..(1285): n is a, c, g, or t
  misc_feature (1288)..(1288): n is a, c, g, or t
  misc_feature (1291)..(1291): n is a, c, g, or t
  misc_feature (1293)..(1293): n is a, c, g, or t
  misc_feature (1298)..(1298): n is a, c, g, or t
  misc_feature (1300)..(1300): n is a, c, g, or t
  misc_feature (1310)..(1310): n is a, c, g, or t
  misc_feature (1312)..(1312): n is a, c, g, or t
  misc_feature (1316)..(1316): n is a, c, g, or t
  misc_feature (1320)..(1320): n is a, c, g, or t
  misc_feature (1329)..(1329): n is a, c, g, or t
  misc_feature (1340)..(1340): n is a, c, g, or t
  misc_feature (1342)..(1342): n is a, c, g, or t
  misc_feature (1344)..(1344): n is a, c, g, or t
  misc_feature (1354)..(1354): n is a, c, g, or t
agagaaattaactatgagaggatcgcatcaccatcaccatcacggatcctatttaggtgacactatagaatcgtcgacccacgcgtccgaggacatgacctccgagcagctggatgacattttgaagtaccacactgagatagtgtttgccaggacctcccctcagcagaagctcatcattgtggaaggctgccaaagacagggtgctatcgtggctgtgactggtgacggtgtgaatgactctccagctttgaagaaagcagacattggggttgctatggggattgctggctcagatgtgtccaagcaagctgctgacatgattcttctggatgacaactttgcctcaattgtgactggagtagaggaaggtcgtctgatctttgataacttgaagaaatccattgcttataccttaaccagtaacattcccgagatcaccccgttcctgatatttattattgcaaacattccactaccactggggactgtcaccatcctctgcattgacttgggcactgacatggttcctgccatctccctggcttatgagcaggctgagagtgacatcatgaagagacagcccagaaatcccaaaacagacaaacttgtgaatgagcggctgatcagcatggcctatgggcagattggaatgatccaggccctgggaggcttctttacttactttgtgattctggctgagaacggcttcctcccaattcacctgttgggcctccgagtggactgggatgaccgctggatcaacgatgtggaagacagctacgggcagcagtggacctatgagcagaggaaaatcgtggagttcacctgccacacagccttcttcgtcagtatcgtggtggtgcagtgggccgacttggtcatctgtaanaccaggangaatncngtcttccagcaggggangaanaacaanatcttgatatttggcccnttgaaaaaaagccctggctgctttccttcctacngcctggaangggngtgctctaagatgttccccncaacctactgggggtctggncttcccnatcncttccatcttcgaaatgacgaantcaaaaactcntcntcnggngacncctggnggtgggggaaaanaanctaantaacccccgtccngcnccnggaaaatnggcnaaantttgancaanccnccccctttggantccncctggnntggganccccccggaaaaanccccccctggggaaanaaaccntgaaaaaaagnccttntgggggggggnggggcgaaacccccttggaanaanggnanttttncnttttttaaanancccnaaanaaaattttngttttaagggntngnaaaaaaaaan

SEQ ID NO: 244 - DNA, 1101 bp, Homo Sapiens
  misc_feature (2)..(2): n is a, c, g, or t
  misc_feature (834)..(834): n is a, c, g, or t
  misc_feature (836)..(837): n is a, c, g, or t
  misc_feature (839)..(839): n is a, c, g, or t
  misc_feature (841)..(864): n is a, c, g, or t
  misc_feature (933)..(933): n is a, c, g, or t
  misc_feature (938)..(938): n is a, c, g, or t
  misc_feature (958)..(958): n is a, c, g, or t
  misc_feature (968)..(968): n is a, c, g, or t
  misc_feature (975)..(975): n is a, c, g, or t
  misc_feature (977)..(977): n is a, c, g, or t
  misc_feature (988)..(988): n is a, c, g, or t
  misc_feature (993)..(993): n is a, c, g, or t
  misc_feature (1002)..(1002): n is a, c, g, or t
  misc_feature (1018)..(1018): n is a, c, g, or t
  misc_feature (1031)..(1031): n is a, c, g, or t
  misc_feature (1038)..(1038): n is a, c, g, or t
  misc_feature (1044)..(1044): n is a, c, g, or t
  misc_feature (1049)..(1049): n is a, c, g, or t
  misc_feature (1077)..(1077): n is a, c, g, or t
  misc_feature (1085)..(1085): n is a, c, g, or t
  misc_feature (1091)..(1091): n is a, c, g, or t
  misc_feature (1094)..(1094): n is a, c, g, or t
antagagaaattactatgagaggatcgcatcaccatcaccatcacggatcctatttaggtgacactatagaatcgtcgacccacgcgtccgccgctgccctgagctcggcgggctggcattcggcccggggaaaagcggagcaggtctgcgaggctaagtgtctccgcggcgcacctcgcggcgagaatccggaggagaaggagactgcaaggataggcccagaaaaacaaccagaaaaaaaaaatctcatcatggcaaatattcaccaggaaaacgaagagatggagcagcctatgcagaatggagaggaagaccgccctttgggaggaggtgaaggccaccagcctgcaggaaatcgacggggacaggctcgccgacttgcccctaattttcgatgggccatacccaataggcagatcaatgatgggatgggtggagatggagatgatatggaaatattcatggaggagatgagagaaatcagaagaaaacttagggagctgcagttgaggaattgtctgcgtatccttatgggggagctctctaatcaccatgaccatcatgatgaattttgccttatgccttgactcctgccatttatcatgagattaatactgtgattcccgctgttttctttttccttgcattttcctaatatgcctttactgatccgtttgctgtgaaccctatgttatttccatgtgtcaagtgggtcttgtgttgccagcttctatttgaagattgcctttgcactcagtgtaagtttctgtcagcagtagtttcacccatttgcatggaaaaatttaaagctaataaagcaatttaaaaagccnannanannnnnnnnnnnnnnnnnnnnnnnnaaagggcggccgctccctatagtgagtcgtattaagcttaattagctgaacttggactcctgttgatanatccngtaatgacctccaaactccntctggatttnttcaaancnctcggttgccnccggncgttttttnttggtgaaaatccaanctagcttggcganattttcnggactnaggancttaaatggaaaaaaaatccctggaaancccccgtngatttnccnatggcct

SEQ ID NO: 245 - DNA, 1191 bp, Homo Sapiens
  misc_feature (1)..(1): n is a, c, g, or t
  misc_feature (835)..(835): n is a, c, g, or t
  misc_feature (875)..(875): n is a, c, g, or t
  misc_feature (906)..(906): n is a, c, g, or t
  misc_feature (923)..(923): n is a, c, g, or t
  misc_feature (925)..(925): n is a, c, g, or t
  misc_feature (945)..(945): n is a, c, g, or t
  misc_feature (954)..(954): n is a, c, g, or t
  misc_feature (956)..(956): n is a, c, g, or t
  misc_feature (961)..(961): n is a, c, g, or t
  misc_feature (985)..(985): n is a, c, g, or t
  misc_feature (1004)..(1004): n is a, c, g, or t
  misc_feature (1007)..(1007): n is a, c, g, or t
  misc_feature (1014)..(1014): n is a, c, g, or t
  misc_feature (1019)..(1020): n is a, c, g, or t
  misc_feature (1026)..(1026): n is a, c, g, or t
  misc_feature (1030)..(1030): n is a, c, g, or t
  misc_feature (1033)..(1033): n is a, c, g, or t
  misc_feature (1038)..(1038): n is a, c, g, or t
  misc_feature (1051)..(1051): n is a, c, g, or t
  misc_feature (1083)..(1083): n is a, c, g, or t
  misc_feature (1097)..(1097): n is a, c, g, or t
  misc_feature (1099)..(1099): n is a, c, g, or t
  misc_feature (1101)..(1101): n is a, c, g, or t
  misc_feature (1105)..(1105): n is a, c, g, or t
  misc_feature (1122)..(1122): n is a, c, g, or t
  misc_feature (1137)..(1137): n is a, c, g, or t
  misc_feature (1140)..(1140): n is a, c, g, or t
  misc_feature (1153)..(1153): n is a, c, g, or t
  misc_feature (1157)..(1157): n is a, c, g, or t
  misc_feature (1162)..(1162): n is a, c, g, or t
  misc_feature (1164)..(1164): n is a, c, g, or t
  misc_feature (1167)..(1167): n is a, c, g, or t
  misc_feature (1173)..(1173): n is a, c, g, or t
  misc_feature (1184)..(1184): n is a, c, g, or t
naaatagagaaattactatgagaggatcgcatcaccatcaccatcacggatcctatttaggtgacactatagaatcgtcgacccacgcgtccgcccacgcgtccgcccacgcgtccgtttgtttctgtcaggctgtccctggccggggttctgtaacgcttgtgtgggccgcaggtggaggtgttgggaaagcgcggaggagatgttgtccccagtgtcccgagacgcgtctgatgctctgcagggacggaagtgcctgcgtccccgatcgagacgcctgccgctcccggcagctgtccgcgcccacggtcctatggcggagctaacggactccgcgcggggctgtgtggtctttgaggatgtgtttgtatacttctctcgggaagaatgggagcttcttgatgatgctcagagacttttgtaccatgatgtgatgctggagaactttgcacttttagcctcactgggaattgcattttccagatcacgtgcagtcatgaaactagagcgaggagaagagccctgggtgtatgaccaggtggatatgacttcagccacagaaagagaggcccagaggggacttagacctggttgttggcatggagtggaggatgaagaggtatcttctgagcagagcatttttgtagcaggagtgtcagaggtcaggactctcatggcagagctggagtctcacccatgtgacatatgtggcccaatattgaaagataccttacacctggctaaataccatgggggaaaagccaggcagaaaccatacttgtgtggggcatgtggaaagcaattctggttcagtacagactttgaccagcaccanaaccagcccaatggagggaaacttttcccaaggaaagganggcaaaaaactctgtgaaaaacttgcaaaantccatgtgccaaaaaananccctcacatgtgggaaaagnaaagaaaananttttncagccacatctgggccttcttcancatcaaggcctctctcaanaancatgaanccccnnaaaaancacnaanccttnggaatggctttcncatgggaaaaaaagtatccaaaggtgtggggnaatggggaaaaccntncncccncaaaaaaacactttgcnccggaatcaaaaaanccnacctggaaaaagncctnaaaantnaanaaaagngggaaattctncacccaa

SEQ ID NO: 246 - DNA, 953 bp, Homo Sapiens
agaggatcgcatcaccatcaccatcacggatcctatttaggtgacactatagaatcgtcgacccacgcgtccgcgcgggagaggagccccactcccccagcgccgcagccaccgcagccaccgcagcccgtgcgccccgcgccctcgagcgccatggccaaggaaggcgtggagaaggcggaggagacggagcaaatgatcgagaaggaggcaggcaaggagccggcggagggcggcggcggcgacggctcgcaccgcctcggggacgcccaggagatgcgcgcggtggtgctggctggcttcggggggctcaacaagctgcggctcttcaggaaggccatgcccgagcctcaggacggcgagctcaagatccgcgtcaaagcctgtggattaaacttcattgacttgatggtgcgacaagggaatattgacaaccctcccaagactcccctggtgccaggatttgagtgttctgggattgttgaagctctgggggacagcgtgaaaggatatgagattggagaccgtgtcatggcatttgtcaattacaatgcctgggcagaggtggtctgcacaccagtggagtttgtctacaagatcccggatgacatgagcttctccgaggctgctgcattccccatgaacttcgtcacagcctatgtgatgctgtttgaagttgccaacctccgggaagggatgtctgtgctcgtgcactcagctggtgggggcgtgggtcaagctgtggctcagctgtgttccactgtccccaacgtgactgtctttggaacagcctctactttcaagcatgaagcaatcaaagactctgtgacccacctctttgacagaaatgcagactacgtgcaagaagttaaaagaatctctgctgaaggtgtggacatcgttttggattgcctctgtggggacaacactggaaaaggtctcagtcttctcaa

SEQ ID NO: 247 - DNA, 1149 bp, Homo Sapiens
  misc_feature (868)..(868): n is a, c, g, or t
  misc_feature (875)..(875): n is a, c, g, or t
  misc_feature (891)..(891): n is a, c, g, or t
  misc_feature (902)..(902): n is a, c, g, or t
  misc_feature (905)..(905): n is a, c, g, or t
  misc_feature (926)..(926): n is a, c, g, or t
  misc_feature (937)..(937): n is a, c, g, or t
  misc_feature (947)..(947): n is a, c, g, or t
  misc_feature (972)..(972): n is a, c, g, or t
  misc_feature (984)..(984): n is a, c, g, or t
  misc_feature (993)..(993): n is a, c, g, or t
  misc_feature (996)..(996): n is a, c, g, or t
  misc_feature (1007)..(1007): n is a, c, g, or t
  misc_feature (1012)..(1012): n is a, c, g, or t
  misc_feature (1016)..(1016): n is a, c, g, or t
  misc_feature (1025)..(1025): n is a, c, g, or t
  misc_feature (1027)..(1027): n is a, c, g, or t
  misc_feature (1035)..(1035): n is a, c, g, or t
  misc_feature (1040)..(1040): n is a, c, g, or t
  misc_feature (1044)..(1044): n is a, c, g, or t
  misc_feature (1064)..(1064): n is a, c, g, or t
  misc_feature (1076)..(1077): n is a, c, g, or t
  misc_feature (1089)..(1089): n is a, c, g, or t
  misc_feature (1092)..(1092): n is a, c, g, or t
  misc_feature (1094)..(1094): n is a, c, g, or t
  misc_feature (1097)..(1097): n is a, c, g, or t
  misc_feature (1102)..(1102): n is a, c, g, or t
  misc_feature (1110)..(1110): n is a, c, g, or t
  misc_feature (1113)..(1115): n is a, c, g, or t
  misc_feature (1121)..(1122): n is a, c, g, or t
  misc_feature (1124)..(1124): n is a, c, g, or t
  misc_feature (1127)..(1127): n is a, c, g, or t
  misc_feature (1137)..(1137): n is a, c, g, or t
atagagaaattaactatgagaggatcgcatcaccatcaccatcacggatcctatttaggtgacactatagaatcgtcgacccacgcgtccgcgtctctgctactggactgtggtgagggcacatttgggcagctgtgccgtcattacggagaccaggtggacagggtcctgggcaccctggctgctgtgtttgtgtcccacctgcacgcagatcaccacacgggcttgccaagtatcttgctgcagagagaacgcgccttggcatctttgggaaagccgcttcaccctttgctggtggttgcccccaaccagctcaaagcctggctccagcagtaccacaaccagtgccaggaggtcctgcaccacatcagtatgattcctgccaaatgccttcaggaaggggctgagatctccagtcctgcagtggaaagattgatcagttcgctgttgcgaacatgtgatttggaagagtttcagacctgtctggtgcggcactgcaagcatgcgtttggctgtgcgctggtgcacacctctggctggaaagtggtctattccggggacaccatgccctgcgaggctctggtccggatggggaaagatgccaccctcctgatacatgaagccaccctggaagatggtttggaagaggaagcagtggaaaagacacacagcacaacgtcccaagccatcagcgtggggatgcggatgaacgcggagttcattatgctgaaccacttcagccagcgctatgccaaggtccccctcttcagccccaacttcagcgagaaagtgggagttgcctttgaccacatgaaggtctgctttggagactttccaacaatgcccaagctgattcccccactgaaancccctgntttgctggcaacatcnaagaaaatggnagnaacgcaaggaaaaaacggganctgcggcaagntgcgggccgnccctcctgtccagggaaactggcangcggcctgaagnaaggggaanccntcaacaaaaancgggncccnccaaaaagnanccccaagnccaanaagntcaaaccccaatagaaaaanttggaaaacccnnaatcaaaaaggnttngnttnttttntcccaaanaannnaccatnntnccncctttgtggnaaaaactaaaaa

SEQ ID NO: 248 - DNA, 1109 bp, Homo Sapiens
  misc_feature (1)..(1): n is a, c, g, or t
  misc_feature (833)..(833): n is a, c, g, or t
  misc_feature (866)..(866): n is a, c, g, or t
  misc_feature (892)..(892): n is a, c, g, or t
  misc_feature (897)..(897): n is a, c, g, or t
  misc_feature (899)..(899): n is a, c, g, or t
  misc_feature (907)..(907): n is a, c, g, or t
  misc_feature (910)..(910): n is a, c, g, or t
  misc_feature (950)..(950): n is a, c, g, or t
  misc_feature (956)..(956): n is a, c, g, or t
  misc_feature (960)..(960): n is a, c, g, or t
  misc_feature (989)..(989): n is a, c, g, or t
  misc_feature (1005)..(1005): n is a, c, g, or t
  misc_feature (1007)..(1007): n is a, c, g, or t
  misc_feature (1018)..(1018): n is a, c, g, or t
  misc_feature (1035)..(1035): n is a, c, g, or t
  misc_feature (1041)..(1041): n is a, c, g, or t
  misc_feature (1058)..(1058): n is a, c, g, or t
  misc_feature (1065)..(1065): n is a, c, g, or t
  misc_feature (1072)..(1072): n is a, c, g, or t
  misc_feature (1074)..(1076): n is a, c, g, or t
  misc_feature (1078)..(1078): n is a, c, g, or t
  misc_feature (1080)..(1081): n is a, c, g, or t
  misc_feature (1087)..(1087): n is a, c, g, or t
  misc_feature (1089)..(1089): n is a, c, g, or t
  misc_feature (1091)..(1091): n is a, c, g, or t
  misc_feature (1105)..(1105): n is a, c, g, or t
naatagagaaattaactatgaagaggatcgcatcaccatcaccatcacggatcctatttaggtgacactatagaatcgtcgacccacgcgtccggtagcaggcggggaccgaacgggtgcctcagtgtccttcccctcccctcgcctggcctcgccgtcctctccccgcagccggaccggaactatgtgatcccggaagttccggggcctttgctgtgtgggataaacagtaatggcggaggctgcaactcccggaacaacagccacaacatcaggagcaggagcggcagcggcgacggcggcagcagcctcccccaccccgatccccacagtcaccgccccgtccctgggggcgggcggagggggcggcggcagcgacggcagcggcggcggctggactaaacaggtcacctgcaggtattttatgcatggggtttgtaaggaaggagacaactgtcgctactcgcatgacctctctgacagtccgtatagtgtagtgtgcaagtattttcagcgagggtactgtatttatggagaccgctgcagatatgaacatagcaaaccattgaaacaggaagaagcaactgctacagagctaactacaaagtcatcccttgctgcttcctcaagtctctcatcgatagttggaccacttgttgaaatgaatacaggcgaagctgagtcaagaaattcaaactttgcaactgtaggagcaggttcagaggactgggtgaatgctattgagtttgttcctgggcaaccctactgtggccgtactgcgccttcctgcactgaagcacccctgcagggctcagtgaccaaggaagaatcanagaaagagcaaccgccgtggagacaaagaacanctgtgcccctatgctgcatgggaaantgccnanacgggganaantgtgtgtatctccacggaaattcttgtgaaatgtgtgggnctgcangtcntgcatcaaatggatgctgcccaaaaattncaacatataaatcgtnantgaagcccatnaaaaagaaatggaactntcattnccggcaacccaacaagnaaatggnggggggnannntncnnggaggngntntataaaaaaaccancccc

SEQ ID NO: 249 - DNA, 973 bp, Homo Sapiens
tgagaggatcgcatcaccatcaccatcacggatcctatttaggtgacactatagaatcgtcgacccacgcgtccgcccacgcgtccgctcctgaggctgacatgaatatttttgaagacattggggattacgtaccctccacaaccaagacacctcgggacaaggagcgggagagatatcgggaacgggagcgtgatcgggaaagagacagagaccgtgaccgagagcgagagcgagaacgagatcgggaacgagagcgagagcgggaccgagagagagaagaggaaaagaagagacacagctactttgagaagccaaaagtagatgatgagcccatggacgttgacaaaggacctgggtctaccaaggagttgatcaagtccatcaatgaaaagtttgctgggtctgctggctgggaaggcacagaatcgttgaagaagccagaagacaaaaagcagctgggagatttctttggcatgtccaacagttatgcagagtgctacccagccacgatggatgacatggctgtggatagtgatgaggaggtggattatagcaaaatggaccagggtaacaagaaggggcccttaggccgttgggactttgatacccaggaagaatacagcgagtatatgaacaacaaagaagctttgcccaaggctgcattccagtatggtatcaaaatgtctgaagggcggaaaaccaggcgcttcaaggaaaccaatgacaaagcagagcttgatcgccagtggaagaagattagtgcaatcattgagaagaggaagaagatggaagctgatggggttgaagtcaaaagaccaaaatactaatcactagttacaaccagagatgctccacaaggatatgctccccacggttttctttctacaatttccaaaggttgcagatgtttttttgtgatgaatataaaattttattgtgtattacttggtttcattaaaattggttaact

SEQ ID NO: 250 - DNA, 1182 bp, Homo Sapiens
  misc_feature (2)..(10): n is a, c, g, or t
  misc_feature (892)..(892): n is a, c, g, or t
  misc_feature (901)..(901): n is a, c, g, or t
  misc_feature (925)..(925): n is a, c, g, or t
  misc_feature (969)..(969): n is a, c, g, or t
  misc_feature (971)..(971): n is a, c, g, or t
  misc_feature (978)..(978): n is a, c, g, or t
  misc_feature (984)..(984): n is a, c, g, or t
  misc_feature (987)..(987): n is a, c, g, or t
  misc_feature (996)..(996): n is a, c, g, or t
  misc_feature (1008)..(1008): n is a, c, g, or t
  misc_feature (1017)..(1017): n is a, c, g, or t
  misc_feature (1020)..(1020): n is a, c, g, or t
  misc_feature (1026)..(1026): n is a, c, g, or t
  misc_feature (1029)..(1029): n is a, c, g, or t
  misc_feature (1033)..(1033): n is a, c, g, or t
  misc_feature (1036)..(1036): n is a, c, g, or t
  misc_feature (1043)..(1044): n is a, c, g, or t
  misc_feature (1046)..(1046): n is a, c, g, or t
  misc_feature (1092)..(1092): n is a, c, g, or t
  misc_feature (1097)..(1097): n is a, c, g, or t
  misc_feature (1101)..(1102): n is a, c, g, or t
  misc_feature (1109)..(1109): n is a, c, g, or t
  misc_feature (1135)..(1135): n is a, c, g, or t
  misc_feature (1140)..(1140): n is a, c, g, or t
  misc_feature (1144)..(1144): n is a, c, g, or t
  misc_feature (1156)..(1156): n is a, c, g, or t
  misc_feature (1160)..(1160): n is a, c, g, or t
  misc_feature (1162)..(1162): n is a, c, g, or t
  misc_feature (1171)..(1172): n is a, c, g, or t
  misc_feature (1174)..(1174): n is a, c, g, or t
tnnnnnnnnnaatagagaaattactatgagaggatcgcatcaccatcaccattcacggatcctatttaggtgacactatagaatcgtcgacccacgcgtccgcccacgcgtccggggcctcgctgcaggacctgaagactgtggtcatcgccaagacccccgggacgggaggcagcccccagggctcctttgcggatggccagcctgccgagcgcagggccagcaatgaccagcgtccccaggaggtcccagcagaggctctggccccggccccagtggaagtcccagctccagcccctgcagcagcctcagcctcaggcccagcgaagactccggccccagcagaggcctcaacttcagctttggtcccagaggagacgccagtggaagctccagccccacccccagccgaggcccctgcccagtacccgagtgagcacctcatccaggccacctcggaggagaatcagatcccctcgcacttgcctgcctgcccgtcgctccggcacgtcgccagcctgcggggcagcgccatcatcgagctcttccacagcagcattgctgaggttgaaaacgaggagctgaggcacctcatgtggtcctcggtggtgttctaccagaccccagggctggaggtgactgcctgcgtgctgctctccaccaaggctgtgtactttgtgctccacgacggcctccgccgctacttctcagagccactgcaggatttctggcatcagaaaaacaccgactacaacaacagccctttccacatctcccagtgcttcgtgctaaagcttagtgacctgcagtcagtcaatgtggggcttttcgaccagcatttccggctgacgggttccaccccgatgcaggtggtcacgtgcttgacgcgggnacagctacntgacgcactgcttcctccagcacntcatggtcgtgctgtcctctctggaacgcacgccctccccggancntgttganaagganttntactccgantttgggaacaanacccagggnaanatgganaantacnagntgatccnntntagtcgggtaaggtttacttaccccagtgaggaagaaattgggganctgantttnnctgtggnccaaaaaatggttgaaccaaaaaggncccancctnaaatttttgttntaantngaggctttnnangggggatg

SEQ ID NO: 251 - DNA, 1171 bp, Homo Sapiens
  misc_feature (534)..(534): n is a, c, g, or t
  misc_feature (595)..(595): n is a, c, g, or t
  misc_feature (694)..(694): n is a, c, g, or t
  misc_feature (773)..(773): n is a, c, g, or t
  misc_feature (797)..(797): n is a, c, g, or t
  misc_feature (804)..(804): n is a, c, g, or t
  misc_feature (810)..(810): n is a, c, g, or t
  misc_feature (819)..(819): n is a, c, g, or t
  misc_feature (828)..(828): n is a, c, g, or t
  misc_feature (832)..(832): n is a, c, g, or t
  misc_feature (844)..(844): n is a, c, g, or t
  misc_feature (855)..(855): n is a, c, g, or t
  misc_feature (863)..(863): n is a, c, g, or t
  misc_feature (873)..(873): n is a, c, g, or t
  misc_feature (880)..(881): n is a, c, g, or t
  misc_feature (905)..(905): n is a, c, g, or t
  misc_feature (907)..(907): n is a, c, g, or t
  misc_feature (915)..(915): n is a, c, g, or t
  misc_feature (919)..(920): n is a, c, g, or t
  misc_feature (923)..(923): n is a, c, g, or t
  misc_feature (929)..(930): n is a, c, g, or t
  misc_feature (956)..(956): n is a, c, g, or t
  misc_feature (960)..(960): n is a, c, g, or t
  misc_feature (962)..(962): n is a, c, g, or t
  misc_feature (969)..(969): n is a, c, g, or t
  misc_feature (976)..(976): n is a, c, g, or t
  misc_feature (989)..(989): n is a, c, g, or t
  misc_feature (1011)..(1011): n is a, c, g, or t
  misc_feature (1015)..(1015): n is a, c, g, or t
  misc_feature (1025)..(1025): n is a, c, g, or t
  misc_feature (1048)..(1049): n is a, c, g, or t
  misc_feature (1053)..(1053): n is a, c, g, or t
  misc_feature (1060)..(1060): n is a, c, g, or t
  misc_feature (1073)..(1073): n is a, c, g, or t
  misc_feature (1076)..(1076): n is a, c, g, or t
  misc_feature (1086)..(1086): n is a, c, g, or t
  misc_feature (1090)..(1090): n is a, c, g, or t
  misc_feature (1100)..(1100): n is a, c, g, or t
  misc_feature (1104)..(1104): n is a, c, g, or t
  misc_feature (1107)..(1107): n is a, c, g, or t
  misc_feature (1120)..(1120): n is a, c, g, or t
  misc_feature (1128)..(1128): n is a, c, g, or t
  misc_feature (1132)..(1132): n is a, c, g, or t
  misc_feature (1142)..(1142): n is a, c, g, or t
  misc_feature (1150)..(1151): n is a, c, g, or t
  misc_feature (1157)..(1157): n is a, c, g, or t
  misc_feature (1162)..(1162): n is a, c, g, or t
  misc_feature (1169)..(1171): n is a, c, g, or t
aatagagaaattactatgagaggatcgcatcaccatcaccatcacggatcctatttaggtgacactatagaatcgtcgacccacgcgtccggtcaccctgaaatccagcagcctcccccaggccctgagtcctatgtacccccataccgccccagcctggaggaggacagcgccagcctgtctggggagagtctggatggacatttgcaggctgtggggtcatgtccaaggctgacgccgccccctgctgacctgcctctggcattgccagcccatgggctatggagccgacacatcctgcagcagacactgatggacgaggggctgcggctcgcccgcctcgtctcccacgaccgcgtgggccgcctcagcccctgtgtgcctgcgaagccacctctcgcagagttcgaggaagggctgctggacagatgtcctgccccaggaccccatcccgcgctggtggagggtcgcaggagcagcgtgaaagtggaggctgaggccagccggcagtgagggttggactggtgtcttcanacccaggacctcagacttctggctcacacagacccccacgctctccatccccggaatctantcacaaccctggatccttcctctgcccttctcctgcctccccacctgctccatgggcataagactgtggggcttcaagcaataacaagcagaggcctgnagagaggacacaaggagggtgcgtggtgccctcacccctgcccagagcgagggggcaaggactctgcctccaaggcatntggggttttccccttccctcaaanaaaaaanttccantctctttangttttgcanccanttggtgttgaancaattggaacncatttggnaaaaaggggnaaaaggnngaactttcccttgggaaaagtccnanctaaaaanttgnnaanattttnnccccccaaaatttggggggcttgggnaaananttggaanctggctnccttttccccttntcctttccccgttttttggggnttcngggtttgttnctttaaaaaaaatttaaaaaagnnttgnaattttncccttccaatttncanataaatcccnaaantcctttttgnaaanttntttcccttgcccnaaaaaaangggngggggggggngggaaatnntttttnttggnccccctnnn

SEQ ID NO: 252 - DNA, 633 bp, Homo Sapiens
catcaccatcaccatcacggatcctatttaggtgacactatagaatcgtcgacccacgcgtccgagcactggctgaccgagagtgcccgcctcatctcccacatgggctctgtggtggagtgggtcacacccctgggcgtccccgtcatccagccctatcgcctggactccaaggtcaagcaaataggaggtggaattcagagcatcacctacacccacaacggagacatcagccgaaagcccaacacacgtaagcagaagaacggcttcccgcccaacttcatccactcgctggactcctcccacatgatgctcaccgccctgcactgctacaggaagggcctgaccttcgtctctgtgcacgactgttactggactcacgcagctgatgtctccgtcatgaaccaggtgtgccgggagcagtttgtccgcttgcacagcgagcccatcctgcaggacctgtccagattcctggtcaagcggttctgctctgagccccagaagatcttggaggccagccagctgaaggagacactgcaggcggtgcccaagccaggggccttcgacctggagcaggtgaagcgttccacctacttcttcagctgacaccccgtgagccttgtcagtgtgtaa

SEQ ID NO: 253 - DNA, 1050 bp, Homo Sapiens
  misc_feature (1)..(1): n is a, c, g, or t
  misc_feature (263)..(263): n is a, c, g, or t
  misc_feature (438)..(438): n is a, c, g, or t
  misc_feature (599)..(599): n is a, c, g, or t
  misc_feature (796)..(796): n is a, c, g, or t
  misc_feature (805)..(805): n is a, c, g, or t
  misc_feature (826)..(826): n is a, c, g, or t
  misc_feature (843)..(843): n is a, c, g, or t
  misc_feature (853)..(853): n is a, c, g, or t
  misc_feature (863)..(863): n is a, c, g, or t
  misc_feature (868)..(868): n is a, c, g, or t
  misc_feature (880)..(880): n is a, c, g, or t
  misc_feature (883)..(883): n is a, c, g, or t
  misc_feature (894)..(894): n is a, c, g, or t
  misc_feature (906)..(906): n is a, c, g, or t
  misc_feature (911)..(911): n is a, c, g, or t
  misc_feature (934)..(934): n is a, c, g, or t
  misc_feature (940)..(941): n is a, c, g, or t
  misc_feature (945)..(945): n is a, c, g, or t
  misc_feature (957)..(957): n is a, c, g, or t
  misc_feature (968)..(968): n is a, c, g, or t
  misc_feature (986)..(986): n is a, c, g, or t
  misc_feature (992)..(992): n is a, c, g, or t
  misc_feature (1002)..(1002): n is a, c, g, or t
  misc_feature (1019)..(1019): n is a, c, g, or t
  misc_feature (1024)..(1025): n is a, c, g, or t
  misc_feature (1027)..(1027): n is a, c, g, or t
  misc_feature (1031)..(1031): n is a, c, g, or t
  misc_feature (1035)..(1036): n is a, c, g, or t
  misc_feature (1038)..(1040): n is a, c, g, or t
  misc_feature (1046)..(1047): n is a, c, g, or t
naattagagaaaattactatgagaggatcgcatcaccatcaccatcacggatcctatttaggtgacactatagaatcgtcgacccacgcgtccgcccagccccgctgtctgcctggtggctgcagccgtggaggactcggtgctgctgctgaacccagctctgggggaccggctggtggcgggcagcacagatcagctgttgagcgccttcgtcccgcctgaggagccccccttgcagccggcccgctggctggaggcctcanaggaggagcgccaagtgggcctgcggctgcgcatctgccacgggaagccagtgacgcaggtgacctggcacgggcgtggggactacctggccgtggtgctggccacccaaggccacacccaggtgctgattcaccagctgagccgtcgccgcagccagagtccgttccgccgcanccacggacaggtgcagcgagtggccttccaccctgcccggcccttcctgttggtggcgtcccagcgcagcgtccgcctctaccacctgctgcgccaggagctcaccaagaagctgatgcccaactgcaagtgggtgtccagcctggcggtgcaccctgcangtgacaacgtcatctgtgggagctacgatagcaagctggtgtggtttgacctgaatctttccaccaagccatacaggatgctgagacaccacaagaaggctctgcgggctgtggccttccacccgcggtacccactctttgcgtcaggctcggacgacggcagtgtcatcgtctgccatggcatggtgtacaatgancttctgcanaaccccttgctggtgcccgtnaaggtgctgaaaagganacttgctgancctaaatctnggaantgctggaaagtnatntttcaacccanccagccgttggntcttntccttcggggggcaaaagggaantgttcnncctnattcacctaacnttttttgcctnactgggggctggggttgntccttntttaaattcnaaaaaaaccttttaccntgtgnnanaaanaaannannnaatatnnaaa

SEQ ID NO: 254 - DNA, 617 bp, Homo Sapiens
  misc_feature (9)..(9): n is a, c, g, or t
  misc_feature (42)..(42): n is a, c, g, or t
  misc_feature (46)..(47): n is a, c, g, or t
  misc_feature (52)..(52): n is a, c, g, or t
tcgagaatntaaaaattatttgctttgtgagcggatacaatntaanngattnattgtgagcggataacaatttacacagaattcattaaagaggagaaattaactatgagaggatcgcatcaccatcaccatcacggatcctatttaggtgacactatagaatcgtcgacccacgcgtccgagcacttccggccagagtgcttcagcgcctttggaaaccgcaagaacctaaagcacaatgccgtgcccacggtgttcgcctttcaggaccccacacagcaggtgagggagaacacagaccctgccagtgagagaggaaatgccagctcttctcagaaagaaaaggtcctccctgaggcgggggccggagaggacagtcctgggagaaacatggacactgcacttgaagagcttcagttgcccccaaatgccgaaggccacgtaaaacaggtctcgccacggaggccgcaagcaacagaggctgttggccggccgactggccctgcaggcctgagaaggacccccaacaagcagccatctgatcacagctatgcccttttggacttagattccctgaagaaaaaactcttcctcactctgaaggaaaatgaaaagct

SEQ ID NO: 255 - DNA, 883 bp, Homo Sapiens
catcaccatcaccatcacggatcctatttaggtgacactatagaatcgtcgacccacgcgtccgaggacttgcagagccacatgatcaaacttcatggagcccccaagccccatgcatgccccacctgtgccaagtgcttcctgtctcggacagagctgcagctgcatgaagctttcaagcaccgtggtgagaagctgtttgtgtgtgaggagtgtgggcaccgggcctcgagccggaatggcctgcagatgcacatcaaggccaagcacaggaatgagaggccacacgtatgtgagttctgcagccacgccttcacccaaaaggccaatctcaacatgcacctgcgcacacacacgggtgagaagcccttccagtgccacctctgtggcaagaccttccgaacccaagccagcctggacaagcacaaccgcacccacaccggggaaaggcccttcagttgcgagttctgtgaacagcgcttcactgagaaggggcccctcctgaggcacgtggccagccgccatcaggagggccggccccacttctgccagatatgcggcaagaccttcaaagccgtggagcaactgcgtgtgcacgtcagacggcacaagggggtgaggaagtttgagtgcaccgagtgtggctacaagtttacccgacaggcccacctgcggaggcacatggagatccacgaccgggtagagaactacaacccgcggcagcgcaagctccgcaacctgatcatcgaggacgagaagatggtggtggtggcgctgcagccgcctgcagagctggaggtgggctcggcggaggtcattgtggagtccctggcccagggcggcctggcctcccagctccccggccagagactgtgtgcagagg

SEQ ID NO: 256 - DNA, 1136 bp, Homo Sapiens
  misc_feature (855)..(855): n is a, c, g, or t
  misc_feature (909)..(909): n is a, c, g, or t
  misc_feature (925)..(925): n is a, c, g, or t
  misc_feature (935)..(935): n is a, c, g, or t
  misc_feature (940)..(940): n is a, c, g, or t
  misc_feature (946)..(946): n is a, c, g, or t
  misc_feature (960)..(960): n is a, c, g, or t
  misc_feature (976)..(976): n is a, c, g, or t
  misc_feature (986)..(986): n is a, c, g, or t
  misc_feature (994)..(994): n is a, c, g, or t
  misc_feature (996)..(996): n is a, c, g, or t
  misc_feature (1002)..(1002): n is a, c, g, or t
  misc_feature (1005)..(1005): n is a, c, g, or t
  misc_feature (1007)..(1007): n is a, c, g, or t
  misc_feature (1009)..(1009): n is a, c, g, or t
  misc_feature (1012)..(1014): n is a, c, g, or t
  misc_feature (1037)..(1038): n is a, c, g, or t
  misc_feature (1040)..(1040): n is a, c, g, or t
  misc_feature (1042)..(1042): n is a, c, g, or t
  misc_feature (1045)..(1045): n is a, c, g, or t
  misc_feature (1054)..(1054): n is a, c, g, or t
  misc_feature (1062)..(1062): n is a, c, g, or t
  misc_feature (1064)..(1065): n is a, c, g, or t
  misc_feature (1085)..(1085): n is a, c, g, or t
  misc_feature (1089)..(1089): n is a, c, g, or t
  misc_feature (1099)..(1099): n is a, c, g, or t
  misc_feature (1102)..(1102): n is a, c, g, or t
  misc_feature (1107)..(1107): n is a, c, g, or t
  misc_feature (1110)..(1110): n is a, c, g, or t
  misc_feature (1133)..(1133): n is a, c, g, or t
  misc_feature (1136)..(1136): n is a, c, g, or t
tagagaaattactatgagaggatcgcatcaccatcaccatcacggatcctatttaggtgacactatagaatcgtcgacccacgcgtccgtgcagccgcccgccgcatccgccgccgcagcccccagcatgtcgggcccagacgtcgagacgccgtccgccatccagatctgccggatcatgcggccagatgatgccaacgtggccggcaatgtccacggggggaccatcctgaagatgatcgaggaggcaggcgccatcatcagcacccggcattgcaacagccagaacggggagcgctgtgtggccgccctggctcgtgtcgagcgcaccgacttcctgtctcccatgtgcatcggtgaggtggcgcatgtcagcgcggagatcacctacacctccaagcactctgtggaggtgcaggtcaacgtgatgtccgaaaacatcctcacaggtgccaaaaagctgaccaataaggccaccctgtggtatgtgcccctgtcgctgaagaatgtggacaaggtcctcgaggtgcctcctgttgtgtattcccggcaggagcaggaggaggagggccggaagcggtatgaagcccagaagctggagcgcatggagaccaagtggaggaacggggacatcgtccagccagtcctcaacccagagccgaacactgtcagctacagccagtccagcttgatccacctggtggggccttcagactgcaccctgcacggctttgtgcacggaggtgtgaccatgaagctcatggatgaggtcgccgggatcgtggctgcacgccactgcaagaccaacatcgtcacagcttccgtggacgccattaattttcatgacaagatcanaaaaggctgcgtcatcaccatctcgggacgcatgaccttcacgagcaaataaantccatggaaaatcgangtgtttggtngaacncccaanccttgtttgtgganagcttttcaaaaaacngctaccgggnccgccagngncctttnttncncntannntgttcccttaaaccaagaaaggnnangntcncttgccttntgcccccnannttggtgccccaaaaaccaangaanaaaaaaaaanccnttttnaanaaggcaaaaggggggttaccttncan

SEQ ID NO: 257 - DNA, 1089 bp, Homo Sapiens
  misc_feature (1)..(1): n is a, c, g, or t
  misc_feature (4)..(4): n is a, c, g, or t
  misc_feature (106)..(106): n is a, c, g, or t
  misc_feature (721)..(721): n is a, c, g, or t
  misc_feature (788)..(788): n is a, c, g, or t
  misc_feature (790)..(790): n is a, c, g, or t
  misc_feature (806)..(806): n is a, c, g, or t
  misc_feature (829)..(829): n is a, c, g, or t
  misc_feature (908)..(908): n is a, c, g, or t
  misc_feature (910)..(910): n is a, c, g, or t
  misc_feature (915)..(915): n is a, c, g, or t
  misc_feature (930)..(930): n is a, c, g, or t
  misc_feature (938)..(938): n is a, c, g, or t
  misc_feature (944)..(944): n is a, c, g, or t
  misc_feature (947)..(947): n is a, c, g, or t
  misc_feature (960)..(960): n is a, c, g, or t
  misc_feature (968)..(968): n is a, c, g, or t
  misc_feature (974)..(974): n is a, c, g, or t
  misc_feature (983)..(983): n is a, c, g, or t
  misc_feature (985)..(985): n is a, c, g, or t
  misc_feature (989)..(991): n is a, c, g, or t
  misc_feature (999)..(999): n is a, c, g, or t
  misc_feature (1002)..(1002): n is a, c, g, or t
  misc_feature (1018)..(1018): n is a, c, g, or t
  misc_feature (1029)..(1029): n is a, c, g, or t
  misc_feature (1031)..(1031): n is a, c, g, or t
  misc_feature (1035)..(1035): n is a, c, g, or t
  misc_feature (1038)..(1038): n is a, c, g, or t
  misc_feature (1044)..(1044): n is a, c, g, or t
  misc_feature (1046)..(1047): n is a, c, g, or t
  misc_feature (1049)..(1049): n is a, c, g, or t
  misc_feature (1061)..(1061): n is a, c, g, or t
  misc_feature (1064)..(1064): n is a, c, g, or t
  misc_feature (1073)..(1073): n is a, c, g, or t
  misc_feature (1083)..(1083): n is a, c, g, or t
nccnaaatagagagaattactatgagaggatcgcatcaccatcaccatcacggatcctatttaggtgacactatagaatcgtcgacccacgcgtccgcccacgcgntccggcaagcagcgtgggttgcctctatttgtcttgagcaaaggtgcatgttgtctcccatggccagaacaagagagggtggaattgaaccttgtcagaggtctggctgacagcgcttaggtctgtagatggcaccacagacaggttgtggccagtgtggacatcctgggtagatgacagttaccgtaagctgggctgggccgggccaggggtggggatgccttggctgggttgatttctaggttttcttgttttcccccagattgaggacgagacgcaggtgtcacgggccactcagggtgaacaggacaattacgagatgcatgtgcgagccgccaacatcgtccgagccggcgagtccctgatgaagctggtgtccgacctcaagcagttcctgatcctcaatgacttcccctccgtgaacgaggccattgaccagcgcaaccagcagctgcgcacactgcaggaggagtgcgaccggaagctcatcacgctgcgagacgagatctccattgacctctacgagctggaggaggagtattactcgtccaggtataaatagcgctggactccccatgcagagcgggagcctgcctacctgggcctggccagcangcagggctgccttctgctttttcaaattcttgctggtcttaacagtggagccatgcctgggtttcanancaaaagctcctggccnagagcgtttgaccgacagacaantcacatccatatgccagggccctgggccctttcccacagtgcaatgtgatgaaaaccacaggactcacgccagtcgganangcccnaatctggaaaaaggnaagccccntggctnttntccccccgcaagnccctcttnccaaanaaccttccncntcgnnnaaatgcgntcnggggggatggggcctngctccctgttnancttncgnaatccnanntntaaaaaaatttncanccaaaagcntggggcccancctttt

SEQ ID NO: 258 - DNA, 948 bp, Homo Sapiens
  misc_feature (732)..(732): n is a, c, g, or t
  misc_feature (750)..(750): n is a, c, g, or t
  misc_feature (792)..(792): n is a, c, g, or t
  misc_feature (807)..(807): n is a, c, g, or t
  misc_feature (815)..(815): n is a, c, g, or t
  misc_feature (834)..(834): n is a, c, g, or t
  misc_feature (849)..(849): n is a, c, g, or t
  misc_feature (853)..(853): n is a, c, g, or t
  misc_feature (856)..(856): n is a, c, g, or t
  misc_feature (866)..(866): n is a, c, g, or t
  misc_feature (875)..(875): n is a, c, g, or t
  misc_feature (881)..(882): n is a, c, g, or t
  misc_feature (900)..(900): n is a, c, g, or t
  misc_feature (902)..(902): n is a, c, g, or t
  misc_feature (914)..(914): n is a, c, g, or t
  misc_feature (918)..(918): n is a, c, g, or t
  misc_feature (921)..(921): n is a, c, g, or t
  misc_feature (924)..(926): n is a, c, g, or t
  misc_feature (935)..(935): n is a, c, g, or t
  misc_feature (941)..(941): n is a, c, g, or t
  misc_feature (945)..(946): n is a, c, g, or t
  misc_feature (948)..(948): n is a, c, g, or t
attagagaaattactatgagaggatcgcatcaccatcaccatcacggatcctatttaggtgacactatagaatcgtcgacccacgcgtccgcctcccctgagctcgagtcttcggatgactcctacgtgtccgctggagaagagcccctagaggcccctgtgtttgagatccccctgcagaatgtggtggtggcaccaggggcagatgtgctgctcaagtgtatcatcactgccaaccccccgccccaagtgtcctggcacaaggatgggtcagcgctgcgcagcgagggccgcctcctcctccgggctgagggtgagcggcacaccctgctgctcagggaggccagggcagcagatgccgggagctatatggccaccgccaccaacgagctgggccaggccacctgtgccgcctcactgaccgtgagacccggtgggtctacatcccctttcagcagccccatcacctccgacgaggaatacctgagccccccagaggagttcccagagcctggggagacctggccgcgaacccccaccatgaagcccagtcccagccagaaccgccgttcttctgacactggctccaaggcaccccccaccttcaaggtctcacttatggaccagtcagtaagagaaggccaagatgtcatcatgagcatccgcgtgcagggggagcccaagcctgtggtctcctggctgaaaaaccgccagcccgtgcgcccagaccancggcgctttgcggaggangctgaaggtgggctgtgccggctgcggatcctggctgcaaancgtggcgatgctggntttctacncttgcaagcggtcaatgantatggtgctcggcantgcnagnccgcttggangtccaagcnagtganntcagggggccaccttggntncccccgctaccnttcnaanccnnncccttgttnaaggancttnngn

SEQ ID NO: 259 - DNA, 1070 bp, Homo Sapiens
  misc_feature (815)..(815): n is a, c, g, or t
  misc_feature (845)..(845): n is a, c, g, or t
  misc_feature (937)..(938): n is a, c, g, or t
  misc_feature (941)..(941): n is a, c, g, or t
  misc_feature (946)..(946): n is a, c, g, or t
  misc_feature (950)..(950): n is a, c, g, or t
  misc_feature (962)..(962): n is a, c, g, or t
  misc_feature (966)..(966): n is a, c, g, or t
  misc_feature (984)..(985): n is a, c, g, or t
  misc_feature (991)..(991): n is a, c, g, or t
  misc_feature (993)..(993): n is a, c, g, or t
  misc_feature (996)..(996): n is a, c, g, or t
  misc_feature (999)..(999): n is a, c, g, or t
  misc_feature (1004)..(1004): n is a, c, g, or t
  misc_feature (1012)..(1012): n is a, c, g, or t
  misc_feature (1014)..(1014): n is a, c, g, or t
  misc_feature (1019)..(1019): n is a, c, g, or t
  misc_feature (1029)..(1029): n is a, c, g, or t
  misc_feature (1031)..(1031): n is a, c, g, or t
  misc_feature (1047)..(1047): n is a, c, g, or t
  misc_feature (1058)..(1058): n is a, c, g, or t
  misc_feature (1063)..(1063): n is a, c, g, or t
  misc_feature (1065)..(1065): n is a, c, g, or t
agaaattaactatgagaggatcgcatcaccatcaccatcacggatcctatttaggtgacactatagaatcgtcgacccacgcgtccggtcagctctacaagctgccctgggtgtgtgaggagggggccgggatccccaccgtcctgcagggccacatcgactgtggctccctgcttggctaccgcgctgtctaccgcatgtgcttcgccacggcggccttcttcttctttttcaccctgctcatgctctgcgtgagcagcagccgggacccccgggctgccatccagaatgggttttggttctttaagttcctgatcctggtgggcctcaccgtgggtgccttctacattcctgacggctccttcaccaacatctggttctacttcggcgtcgtgggctccttcctcttcatcctcatccagctggtgctgctcatcgactttgcgcactcctggaaccagcggtggctgggcaaggccgaggagtgcgattcccgtgcctggtacgcaggcctcttcttcttcactctcctcttctacttgctgtcgatcgcggccgtggcgctgatgttcatgtactacactgagcccagcggctgccacgagggcaaggtcttcatcagcctcaacctcaccttctgtgtctgcgtgtccatcgctgctgtcctgcccaaggtccaggacgcccagcccaactcgggtctgctgcaggcctcggtcatcaccctctacaccatgtttgtcacctggtcagccctatccagtatccctgaacagaaatgcaacccccatttgccaacccagctgggcaacganacagttgtggcaggccccgagggctatganacccagtggtgggatgccccgagcattgtgggcctcatcatcttcctcctgtgcaccctcttcatcagtctgcgctcctcaaaacaaccggnnagngaaanagcntgaagcaaaccnagantgcccacctatgctaaannccacanancancancacancaggtggnancctgngaaggccggncnttgaaaaaaaaaaagnaaggggtcacntaaantnatcct

SEQ ID NO: 260 - DNA, 1105 bp, Homo Sapiens
  misc_feature (1)..(4): n is a, c, g, or t
  misc_feature (731)..(731): n is a, c, g, or t
  misc_feature (1068)..(1068): n is a, c, g, or t
  misc_feature (1076)..(1076): n is a, c, g, or t
  misc_feature (1079)..(1079): n is a, c, g, or t
  misc_feature (1082)..(1082): n is a, c, g, or t
  misc_feature (1085)..(1085): n is a, c, g, or t
  misc_feature (1087)..(1087): n is a, c, g, or t
  misc_feature (1090)..(1090): n is a, c, g, or t
  misc_feature (1093)..(1095): n is a, c, g, or t
  misc_feature (1099)..(1103): n is a, c, g, or t
nnnncttaagaatacttgagaggatgcatcaccatcaccatcacggtcgacccacgcgtccggttgaaagtgtgatgaacagtgtggtatccctactcttgatcctggaaccagacaagcaagaagctttgattgaaagcctatgtgaaaagctggtcaaatttcgcgaaggtgaacgcccgtctctgagactgcagttgttaagcaaccttttccacgggatggataagaatactcctgtaagatacacagtgtattgcagccttattaaagtggcagcatcttgtggggccatccagtacatcccaactgagctggatcaagttagaaaatggatttctgactggaatctcaccactgaaaaaaagcacacccttttaagactactttatgaggcacttgtggattgtaagaagagtgatgctgcttcaaaagtcatggtggaattgctcggaagttacacagaggacaatgcttcccaggctcgagttgatgcccacaggtaatgttaaacgttactctgatgagggtttgacagcgatgtagaggtaagctacaatattaaattaagtaactgaaatcatgtttgcaactaccagtgatccagagccatttgatagtgtgtatttcctggtgattctaatgtagatactaaaattcaaggtttgatattggaagaactgtggattgaatatgaagtagctgcatggcgttacctgccgggggggggnaatgctggatgggcgaattatgatcccaacccaggaattaaacctaatcttcggcaattgacctaattttaggttataggtggaacttgatggcttgccaaaattacccattgctatgagtataaggcttttacagtctagatctactggtacaaaatagaatcagtttctaatcttgtataaggatatgaacttcttttttggcatgctttggggaactcactgatagagtggaaaaaggattggggaaaaactgactttaggcaggggctccttcaatctatcccccttatgaacttctaacgtttaagtataaggggaaaaaaatgttgtttangtttcggnaanaanatngnganaannntagnnnnngg

SEQ ID NO: 261 - DNA, 616 bp, Homo Sapiens
  misc_feature (37)..(37): n is a, c, g, or t
  misc_feature (39)..(39): n is a, c, g, or t
  misc_feature (46)..(46): n is a, c, g, or t
  misc_feature (97)..(97): n is a, c, g, or t
  misc_feature (112)..(112): n is a, c, g, or t
  misc_feature (115)..(115): n is a, c, g, or t
  misc_feature (243)..(243): n is a, c, g, or t
  misc_feature (384)..(384): n is a, c, g, or t
  misc_feature (475)..(475): n is a, c, g, or t
  misc_feature (508)..(508): n is a, c, g, or t
  misc_feature (515)..(515): n is a, c, g, or t
  misc_feature (522)..(522): n is a, c, g, or t
  misc_feature (530)..(530): n is a, c, g, or t
  misc_feature (541)..(541): n is a, c, g, or t
  misc_feature (546)..(546): n is a, c, g, or t
  misc_feature (552)..(552): n is a, c, g, or t
  misc_feature (557)..(558): n is a, c, g, or t
  misc_feature (576)..(577): n is a, c, g, or t
  misc_feature (579)..(580): n is a, c, g, or t
  misc_feature (586)..(586): n is a, c, g, or t
  misc_feature (591)..(591): n is a, c, g, or t
  misc_feature (595)..(595): n is a, c, g, or t
  misc_feature (597)..(598): n is a, c, g, or t
  misc_feature (602)..(602): n is a, c, g, or t
  misc_feature (607)..(607): n is a, c, g, or t
gagagattactatgagaggatcgcatcaccatcaccntnacggatnctatttaggtgacactatagaatcgtcgacccacgcgtccgtgcgctgtgntcgaggggtgccggncangcctgagcgagcgagctagccagcaggcatcgagggggcgcggctgccgtccggacgagacaggcgaacccgacgcataagagtccaccaccggacagccagcacatccacgatggagcgtcttgtcncccgtgggaccttcccagtactagtgcgcaccagcgcctgccgcagcctcttcgggccggtggaccacgaggagctgagccgcgagctgcaggcccgcctggccgagctgaacgccgaggaccagaaccgctgggattacnacttccagcaggacatgccgctgcggggccctggacgcctgcagtggaccgaagtggacagcgactcggtgcccgcgttctaccgcgaganggtgcaggtggggcgctgccgcctgctgctggngccgcgncccgtcncggtcgcngtggttgtcancccgnccctcnagccnnccgctgattctctcgaanngnntctagnacgcnccgnannaagnttccntagtgaccc

SEQ ID NO: 262 - DNA, 859 bp, Homo Sapiens
tgagaggatcgcatcaccatcaccatcacggatcctatttaggtgacactatagaatcgtcgacccacgcgtccgcccacgcgtccggtgggactgggatcatcagtctcttctgtgcacactatgcgcggcctaaagcggtgtacgcggtggaggccagtgagatggcacagcacacggggcagctggtcctgcagaacggctttgctgacatcatcaccgtgtaccagcagaaggtggaggatgtggtgctgcccgagaaggtggacgtgctggtgtctgagtggatggggacctgcctgctgtttgagttcatgatcgagtccatcctgtatgcccgggatgcctggctgaaggaggacggggtcatttggcccaccatggctgcgttgcaccttgtgccctgcagtgctgataaggattatcgtagcaaggtgctcttctgggacaacgcgtacgagttcaacctcagcgctctgaaatctttagcagttaaggagtttttttcaaagcccaagtataaccacattttgaaaccagaagactgtctctctgaaccgtgcactatattgcagttggacatgaaaaccgtgcaaatttctgatctagagaccctgaggggcgagctgcgcttcgacatcaggaaggcggggaccctgcacggcttcacggcctggtttagcgtccacttccagagcctgcaggaggggcagccgccgcaggtgctcagcaccgaggcccttccaccccaccacacactggaagcagacgctgttcatgatggacgacccagtccctgtccatacatgagacgtggtcacggggtcagttgtgttgcagagaaacccagtgtggagaa

SEQ ID NO: 263 - DNA, 1179 bp, Homo Sapiens
  misc_feature (939)..(939): n is a, c, g, or t
  misc_feature (943)..(943): n is a, c, g, or t
  misc_feature (964)..(964): n is a, c, g, or t
  misc_feature (973)..(973): n is a, c, g, or t
  misc_feature (997)..(997): n is a, c, g, or t
  misc_feature (1006)..(1006): n is a, c, g, or t
  misc_feature (1008)..(1008): n is a, c, g, or t
  misc_feature (1012)..(1012): n is a, c, g, or t
  misc_feature (1016)..(1016): n is a, c, g, or t
  misc_feature (1042)..(1042): n is a, c, g, or t
  misc_feature (1094)..(1095): n is a, c, g, or t
  misc_feature (1108)..(1108): n is a, c, g, or t
  misc_feature (1122)..(1122): n is a, c, g, or t
  misc_feature (1129)..(1129): n is a, c, g, or t
  misc_feature (1133)..(1133): n is a, c, g, or t
  misc_feature (1135)..(1136): n is a, c, g, or t
  misc_feature (1145)..(1146): n is a, c, g, or t
  misc_feature (1153)..(1153): n is a, c, g, or t
  misc_feature (1155)..(1155): n is a, c, g, or t
  misc_feature (1159)..(1159): n is a, c, g, or t
  misc_feature (1167)..(1168): n is a, c, g, or t
  misc_feature (1175)..(1175): n is a, c, g, or t
  misc_feature (1179)..(1179): n is a, c, g, or t
aatagagaaattactatgagaggatcgcatcaccatcaccatcacggatcctatttaggtgacactatagaatcgtcgacccacgcgtccgccgtgaagaaggcagataaagtggagcagaggaagctgctggaaaagtgtgccatgaccgctctgagctccaagctgatctcccagcagaaagctttctttgctaagatggtggtggatgcagtgatgatgctcgatgatttgctgcagcttaaaatgattggaatcaagaaggtacagggtggagccctcgaggattctcagctggtagctggtgttgcattcaagaagactttctcttacgctgggtttgaaatgcaacccaaaaagtaccacaatcccaagattgcccttttgaatgtcgagctcgagttgaaagctgagaaagacaatgctgagataagagtccacacagttgaggattatcaggcaattgttgatgctgagtggaacattctctatgacaagttagagaagatccatcattctggagccaaagttgtcttgtccaaactccccattggggatgtggccacccagtactttgctgacagggacatgttctgtgctggccgagtacctgaggaggatctgaagaggacaatgatggcctgtggaggctcaatccagaccagtgtgaatgctctgtcagcagatgtgctgggtcgatgccaggtgtttgaagagacccagattggaggcgagaggtacaatttttttactggctgccccaaggccaagacatgcaccttcattctccgtggcggcgccgagcagtttatggaggagacagagcggtctctgcatgatgccatcatgatcgtcaggagggccatcaagaatgattcagtggtggctggtggcggggccattgagatggaactctccaagtacctgcgggattactcnaggnactattccaggaaaacagcanctgttgatnggggcatatgccaaggccttgganattatcccncnccanctgngtgacaatgctggctttgatgccccnaacattctcaaaagctgcgggctcggcatgcccaggggggtacatggtatgnntaaacttcacacnaggacttgctgacnctttgancttncnnggggacccnnttggggngnatantgcctganncaccccngagn

SEQ ID NO: 264 - DNA, 1179 bp, Homo Sapiens
  misc_feature (847)..(847): n is a, c, g, or t
  misc_feature (863)..(863): n is a, c, g, or t
  misc_feature (895)..(895): n is a, c, g, or t
  misc_feature (900)..(900): n is a, c, g, or t
  misc_feature (920)..(920): n is a, c, g, or t
  misc_feature (936)..(936): n is a, c, g, or t
  misc_feature (961)..(961): n is a, c, g, or t
  misc_feature (966)..(966): n is a, c, g, or t
  misc_feature (969)..(969): n is a, c, g, or t
  misc_feature (999)..(999): n is a, c, g, or t
  misc_feature (1014)..(1014): n is a, c, g, or t
  misc_feature (1023)..(1023): n is a, c, g, or t
  misc_feature (1034)..(1034): n is a, c, g, or t
  misc_feature (1044)..(1045): n is a, c, g, or t
  misc_feature (1065)..(1065): n is a, c, g, or t
  misc_feature (1075)..(1075): n is a, c, g, or t
  misc_feature (1079)..(1079): n is a, c, g, or t
  misc_feature (1087)..(1087): n is a, c, g, or t
  misc_feature (1102)..(1102): n is a, c, g, or t
  misc_feature (1121)..(1121): n is a, c, g, or t
  misc_feature (1124)..(1124): n is a, c, g, or t
  misc_feature (1128)..(1128): n is a, c, g, or t
  misc_feature (1141)..(1142): n is a, c, g, or t
  misc_feature (1144)..(1144): n is a, c, g, or t
  misc_feature (1148)..(1148): n is a, c, g, or t
  misc_feature (1157)..(1158): n is a, c, g, or t
  misc_feature (1166)..(1166): n is a, c, g, or t
  misc_feature (1169)..(1169): n is a, c, g, or t
  misc_feature (1172)..(1172): n is a, c, g, or t
  misc_feature (1176)..(1176): n is a, c, g, or t
tagagagattaactatgagaggatcgcatcaccatcaccatcacggatcctatttaggtgacactatagaatcgtcgacccacgcgtccggtcaggtagactgtgaggagaaagtgaagggttttaagtggggaaatgacatgatttggtttttattttaggattacaggcgtgagccgccgcgcctggctgcttgcagcctttatattatctatggctgctattatataccctctccagttctgctgcagtggcataatagagtaattgtgccgagaatgaatttgtctctaggcccaaaagcctaaaatatctacattctggccccttaagagtttgctgaccttgctctagcttgctaccttccactttctaccttcttattcctggggttctcacgccccagcccagacccttccaaccctcacaggtgcctgtccttgatccctctcccttcccttcagcatctacacgggcgacagcttcgtcaccccttgatggggcagcctcttcccctcatcacagactatgctgttcagccacatgtgggcacgggggcagtgaaggtgactccagctcacagtcctgccgatgctgagatgggggcccgacatggcttgagccccttgaatgtcattgcggaggatgggaccatgacctccctctgcggggactggttgcagggtcttcaccggtttgtggcccgggaaaagataatgtctgtgctgagtgaacggggcctattccggggcctccagaaccaccccatggtactgcccatctgcagccgttctggggatgtgatagaatacctgctgaagaaccagtggttttgtccgctgccagnaaaatgggggcccganctgccaaggctgtggagtcgggggccctgganctcantccctccttccaccaaaaanactgggcagcactggnttttcccatattgggggactggtgntgtcnccnggcagctggggggggggccatcaaaatccnagcctacctggttgnaaaagaacnatgccccaagnaaaaaaaaanngttggggggttggggcggtnaaaagctgangccnaaaaaggnaccacggaaactganagggaggccaggggcaaanctnaccntggaaaaggaatnngnaggnccaaaaaanngggttttnttnggnccgnttc

SEQ ID NO: 265 - DNA, 1032 bp, Homo Sapiens
  misc_feature (358)..(358): n is a, c, g, or t
  misc_feature (397)..(397): n is a, c, g, or t
  misc_feature (755)..(755): n is a, c, g, or t
  misc_feature (863)..(863): n is a, c, g, or t
  misc_feature (878)..(878): n is a, c, g, or t
  misc_feature (904)..(904): n is a, c, g, or t
  misc_feature (911)..(911): n is a, c, g, or t
  misc_feature (917)..(917): n is a, c, g, or t
  misc_feature (924)..(924): n is a, c, g, or t
  misc_feature (928)..(928): n is a, c, g, or t
  misc_feature (936)..(936): n is a, c, g, or t
  misc_feature (943)..(943): n is a, c, g, or t
  misc_feature (945)..(945): n is a, c, g, or t
  misc_feature (952)..(952): n is a, c, g, or t
  misc_feature (957)..(957): n is a, c, g, or t
  misc_feature (964)..(964): n is a, c, g, or t
  misc_feature (968)..(969): n is a, c, g, or t
  misc_feature (976)..(976): n is a, c, g, or t
  misc_feature (986)..(986): n is a, c, g, or t
  misc_feature (991)..(991): n is a, c, g, or t
  misc_feature (1005)..(1005): n is a, c, g, or t
  misc_feature (1009)..(1009): n is a, c, g, or t
  misc_feature (1011)..(1011): n is a, c, g, or t
  misc_feature (1013)..(1013): n is a, c, g, or t
  misc_feature (1017)..(1017): n is a, c, g, or t
  misc_feature (1022)..(1022): n is a, c, g, or t
  misc_feature (1027)..(1027): n is a, c, g, or t
  misc_feature (1030)..(1030): n is a, c, g, or t
tagagaaattactatgagaggatcgcatcaccatcaccatcacggatcctatttaggtgacactatagaatcgtcgacccacgcgtccggacagacccgcggggcaaacggactggggccaagagccgggagcgcgggcgcaaaggcaccagggcccgcccagggcgccgcgcagcacggccttgggggttctgcgggccttcgggtgcgcgtctcgcctctagccatggggtccgcagcgttggagatcctgggcctggtgctgtgcctggtgggctgggggggtctgatcctggcgtgcgggctgcccatgtggcaggtgaccgccttcctggaccacaacatcgtgacggcgcanaccacctggaaggggctgtggatgtcgtgcgtggtgcanagcaccgggcacatgcagtgcaaagtgtacgactcggtgctggctctgagcaccgaggtgcaggcggcgcgggcgctcaccgtgagcgccgtgctgctggcgttcgttgcgctcttcgtgaccctggcgggcgcgcagtgcaccacctgcgtggccccgggcccggccaaggcgcgtgtggccctcacgggaggcgtgctctacctgttttgcgggctgctggcgctcgtgccactctgctggttcgccaacattgtcgtccgcgagttttacgacccgtctgtgcccgtgtcgcaaaagtacgagctgggcgcagcgctgtacatcggctgggcggccaccgcgctgctcatggtangcggctgcctcttgtgctgcggcgcctgggtctgcaccggccgtcccgacctcagcttccccgtgaagtactcagcgccgcggcggcccacggccaccggcgactacnacaaaaaaaactacntctgaaggcgctgggcacggccgggncccctcntgccanccacgcntgcnaagcgttngaataancntgggganccccncatgganccgnngcttccnccgggtaacncggcncgcaagctcttcgnaaantncnggtnttgcnccccnaancg

SEQ ID NO: 266 - DNA, 1214 bp, Homo Sapiens
  misc_feature (1)..(1): n is a, c, g, or t
  misc_feature (917)..(917): n is a, c, g, or t
  misc_feature (933)..(933): n is a, c, g, or t
  misc_feature (940)..(940): n is a, c, g, or t
  misc_feature (949)..(949): n is a, c, g, or t
  misc_feature (967)..(967): n is a, c, g, or t
  misc_feature (970)..(970): n is a, c, g, or t
  misc_feature (996)..(996): n is a, c, g, or t
  misc_feature (1016)..(1016): n is a, c, g, or t
  misc_feature (1020)..(1020): n is a, c, g, or t
  misc_feature (1032)..(1032): n is a, c, g, or t
  misc_feature (1048)..(1049): n is a, c, g, or t
  misc_feature (1056)..(1056): n is a, c, g, or t
  misc_feature (1063)..(1063): n is a, c, g, or t
  misc_feature (1068)..(1068): n is a, c, g, or t
  misc_feature (1070)..(1070): n is a, c, g, or t
  misc_feature (1089)..(1089): n is a, c, g, or t
  misc_feature (1093)..(1093): n is a, c, g, or t
  misc_feature (1095)..(1095): n is a, c, g, or t
  misc_feature (1107)..(1107): n is a, c, g, or t
  misc_feature (1115)..(1116): n is a, c, g, or t
  misc_feature (1120)..(1120): n is a, c, g, or t
  misc_feature (1139)..(1140): n is a, c, g, or t
  misc_feature (1149)..(1149): n is a, c, g, or t
  misc_feature (1159)..(1159): n is a, c, g, or t
  misc_feature (1163)..(1163): n is a, c, g, or t
  misc_feature (1184)..(1184): n is a, c, g, or t
  misc_feature (1186)..(1186): n is a, c, g, or t
  misc_feature (1198)..(1198): n is a, c, g, or t
  misc_feature (1204)..(1204): n is a, c, g, or t
  misc_feature (1207)..(1207): n is a, c, g, or t
naattagagaaattactatgagaggatcgcatcaccatcaccatcacggatcctatttaggtgacactatagaatcgtcgacccacgcgttccggccagaaccgcctcggctccagcaaatcaggcgataactccagttccagtctgggagatgtggtgactggcacccgccgccccacaccccctgccagtgccaaacagaagcagaagtcgacagagcatgtgcccccctatgacgtggtgccttccatgaggcccatcatcctggtgggaccgtcgctcaagggctacgaggttacagacatgatgcagaaagctttatttgacttcttgaagcatcggtttgatggcaggatctccatcactcgtgtgacggcagatatttccctggctaagcgctcagttctcaacaaccccagcaaacacatcatcattgagcgctccaacacacgctccagcctggctgaggtgcagagtgaaatcgagcgaatcttcgagctggcccggacccttcagttggtcgctctggatgctgacaccatcaatcacccagcccagctgtccaagacctcgctggcccccatcattgtttacatcaagatcacctctcccaaggtacttcaaaggctcatcaagtcccgaggaaagtctcagtccaaacacctcaatgtccaaatagcggcctcggaaaagctggcacagtgcccccctgaaatgtttgacatcatcctggatgagaaccaattggaggatgcctgcgagcatctggcggagtacttggaagcctattggaaggccacacacccgcccagcagcacgccacccaatccgctgctgaaccgcaccatggctaccgcagccctggctgccagccctgccccttgtctccaacctcaagggaaccctaccttgcttcngggaacaagccactgnaacgggnccaccgggnaagcacgccagcatgcangantacccaggggagttgggccagccccnaggcttttaccccagcaacnaccnacaaggccgggnaggccccttacgggcnntgtcccnccaaaanttttnangccaaaaccccggggagcnaaantngcctaaaggaantggaaaannttgntggaattgaaaatgacccnnaaagggccnggttgaaacntggnggggggccccccccccccaangnttctgggggaangaaaanttnaaaaatt

SEQ ID NO: 267 - DNA, 806 bp, Homo Sapiens
  misc_feature (118)..(118): n is a, c, g, or t
  misc_feature (349)..(349): n is a, c, g, or t
  misc_feature (465)..(465): n is a, c, g, or t
  misc_feature (482)..(482): n is a, c, g, or t
  misc_feature (484)..(484): n is a, c, g, or t
  misc_feature (487)..(487): n is a, c, g, or t
  misc_feature (489)..(489): n is a, c, g, or t
  misc_feature (493)..(493): n is a, c, g, or t
  misc_feature (523)..(523): n is a, c, g, or t
  misc_feature (540)..(540): n is a, c, g, or t
  misc_feature (563)..(563): n is a, c, g, or t
  misc_feature (570)..(570): n is a, c, g, or t
  misc_feature (590)..(590): n is a, c, g, or t
  misc_feature (595)..(595): n is a, c, g, or t
  misc_feature (603)..(603): n is a, c, g, or t
  misc_feature (613)..(614): n is a, c, g, or t
  misc_feature (619)..(619): n is a, c, g, or t
  misc_feature (632)..(632): n is a, c, g, or t
  misc_feature (634)..(635): n is a, c, g, or t
  misc_feature (644)..(644): n is a, c, g, or t
  misc_feature (649)..(649): n is a, c, g, or t
  misc_feature (651)..(651): n is a, c, g, or t
  misc_feature (661)..(662): n is a, c, g, or t
  misc_feature (685)..(685): n is a, c, g, or t
  misc_feature (712)..(712): n is a, c, g, or t
  misc_feature (717)..(717): n is a, c, g, or t
  misc_feature (725)..(725): n is a, c, g, or t
  misc_feature (734)..(734): n is a, c, g, or t
  misc_feature (739)..(739): n is a, c, g, or t
  misc_feature (743)..(743): n is a, c, g, or t
  misc_feature (747)..(747): n is a, c, g, or t
  misc_feature (749)..(749): n is a, c, g, or t
  misc_feature (752)..(752): n is a, c, g, or t
  misc_feature (756)..(756): n is a, c, g, or t
  misc_feature (770)..(770): n is a, c, g, or t
  misc_feature (775)..(775): n is a, c, g, or t
  misc_feature (779)..(779): n is a, c, g, or t
  misc_feature (790)..(790): n is a, c, g, or t
  misc_feature (800)..(800): n is a, c, g, or t
atcttaaagaggagaattaactatcgagaggatcgcatcaccatcaccatcacggatcctatttaggtgacactatagaatcgtcgacccacgcgtccgatctgacttacacccctgnaagatgtcgaagggaacgttcagctggaaactggagataaaataaactttgtaattgataacaataaacatactggtgctgtaagtgctcgcaacattatgctgttgaaaaagaaacaagcccgctgtcagggagtagtttgtgccatgaaggaggcatttggctttattgaaagaggtgatgttgtaaaagagatattctttcactatagtgaatttaagggtgacttanaaaccttacagcctggcgatgatgtggaattcacaatcaaggacagaaatggtaaagaagttgcaacagatgtcagactattgcctcaaggaacagtcattttttgaagatatcanccattgaaacattttgnanggnanctgnaaaccaaaagttatccccaaaagtaccccnggaaaaaaacccagaantggacccccatttgcccaggcancgcaatncaaaaggttggaccttttgntggantccccctnaaaaagaaanntttcnccctttttgggangnnccaaagaantaccngnaaatttcccnnagggtgggaccccctggcttggngaaaggtgtggacaccaagggtttaanggtcnttaattantttttccanaccangaancgcnancgngggncccaaatatttaangaggnggcnggcaatccccnattaatatanaaaagt

SEQ ID NO: 268 - DNA, 1048 bp, Homo Sapiens
  misc_feature (807)..(807): n is a, c, g, or t
  misc_feature (827)..(827): n is a, c, g, or t
  misc_feature (860)..(860): n is a, c, g, or t
  misc_feature (874)..(874): n is a, c, g, or t
  misc_feature (876)..(876): n is a, c, g, or t
  misc_feature (888)..(888): n is a, c, g, or t
  misc_feature (897)..(897): n is a, c, g, or t
  misc_feature (913)..(913): n is a, c, g, or t
  misc_feature (927)..(927): n is a, c, g, or t
  misc_feature (930)..(930): n is a, c, g, or t
  misc_feature (932)..(932): n is a, c, g, or t
  misc_feature (936)..(936): n is a, c, g, or t
  misc_feature (951)..(951): n is a, c, g, or t
  misc_feature (959)..(959): n is a, c, g, or t
  misc_feature (963)..(963): n is a, c, g, or t
  misc_feature (965)..(965): n is a, c, g, or t
  misc_feature (990)..(990): n is a, c, g, or t
  misc_feature (995)..(995): n is a, c, g, or t
  misc_feature (1002)..(1002): n is a, c, g, or t
  misc_feature (1006)..(1006): n is a, c, g, or t
  misc_feature (1010)..(1010): n is a, c, g, or t
  misc_feature (1017)..(1017): n is a, c, g, or t
  misc_feature (1020)..(1021): n is a, c, g, or t
  misc_feature (1026)..(1029): n is a, c, g, or t
  misc_feature (1035)..(1036): n is a, c, g, or t
  misc_feature (1042)..(1042): n is a, c, g, or t
tagagaaattactatgagaggatcgcatcaccatcaccatcacggatcctatttaggtgacactatagaatcgtcgacccacgcgtccgggtttttcggatcatgtctggtggctccgcggattataacagcagagaacatggcggcccagagggaatggaccccgatggtgtcatcgagagcaactggaatgagattgttgataactttgatgatatgaatttaaaggagtctctccttcgtggcatctatgcttacggttttgagaagccttccgctattcagcagagagctattattccctgtattaaagggtatgatgtgattgctcaagctcagtcaggtactggcaagacagccacatttgctatttccatcctgcaacagttggagattgagttcaaggagacccaagcactagtattggcccccaccagagaactggctcaacagatccaaaaggtaattctggcacttggagactatatgggagccacttgtcatgcctgcattggtggaacaaatgttcgaaatgaaatgcaaaaactgcaggctgaagcaccacatattgttgttggtacacccgggagagtgtttgatatgttaaacagaagatacctttctccaaaatggatcaaaatgtttgttttggatgaagcagatgaaatgttgagccgtggttttaaggatcaaatctatgagattttccaaaaactaaacacaagtattcaggttgtgttgctttctgccacaatgccaactgatgtgttggaagtgaccaaaaaaattcatgagagatccaattcnaattctggtgaaaaaggaanaattgacccttgaaggaaatcaaacagttttanattaatgttgaaananaggaatggaaanttggatacnctttgtgacttgtacnaaacactgaccatnacncnggcngttatttttctcaanacaaggcncaangnggactggctgactgaaaaaatgccngccanaaacttnccantttnctgcccngcnnggggnnnnggaccnnaagganaaaaaa

SEQ ID NO: 269 - DNA, 1062 bp, Homo Sapiens
  misc_feature (833)..(833): n is a, c, g, or t
  misc_feature (849)..(849): n is a, c, g, or t
  misc_feature (902)..(902): n is a, c, g, or t
  misc_feature (916)..(916): n is a, c, g, or t
  misc_feature (930)..(930): n is a, c, g, or t
  misc_feature (935)..(935): n is a, c, g, or t
  misc_feature (946)..(946): n is a, c, g, or t
  misc_feature (948)..(948): n is a, c, g, or t
  misc_feature (955)..(956): n is a, c, g, or t
  misc_feature (979)..(979): n is a, c, g, or t
  misc_feature (981)..(981): n is a, c, g, or t
  misc_feature (993)..(993): n is a, c, g, or t
  misc_feature (1001)..(1001): n is a, c, g, or t
  misc_feature (1007)..(1007): n is a, c, g, or t
  misc_feature (1019)..(1020): n is a, c, g, or t
  misc_feature (1022)..(1022): n is a, c, g, or t
  misc_feature (1027)..(1028): n is a, c, g, or t
  misc_feature (1039)..(1039): n is a, c, g, or t
  misc_feature (1041)..(1041): n is a, c, g, or t
  misc_feature (1043)..(1043): n is a, c, g, or t
  misc_feature (1046)..(1046): n is a, c, g, or t
  misc_feature (1048)..(1049): n is a, c, g, or t
  misc_feature (1055)..(1055): n is a, c, g, or t
  misc_feature (1058)..(1058): n is a, c, g, or t
agaaattaactatgagaggatcgcatcaccatcaccatcacggatcctatttaggtgacactatagaatcgtcgacccacgcgtccgcccacgcgtccgaggttcgcctgcagtctcagcggccctccatggccagcgagctgatgccttcctccagactgtggagcctctcctataccaaattgccctcctctctccaatccacagggaagtgcctcctgtattgcaatggtgtcctggagcctctgtacctgtgcccaaatggtgcccgctgtgccacctggtttcaagaccctacccgcttcactggcaccatggatgccttcgtgaagatcgtgaggcacgagggcaccaggaccctctggagcggcctccccgccaccctggtgatgactgtgccagctaccgccatctacttcactgcctatgaccaactgaaggccttcctgtgtggtcgagccctgacctctgacctctacgcacccatggtggctggcgcgctggcccgcctgggcaccgtgactgtgatcagccccctggagcttatgcggacaaagctgcaggctcagcatgtgtcgtaccgggagctgggtgcctgtgttcgaactgcagtggctcagggtggctggcgctcactgtggctgggctggggccccactgcccttcgagatgtgcccttctcagccctgtactggttcaactatgagctggtgaagagctggctcaatgggttcaggccgaaggaccagacttctgtgggcatgagctttgtggctggtggcatctcagggacggtggctgcagtgctgactctaccctttgacgtggtaaanacccaacgccaggtcnctctgggaacgatggaagctgtgaaaatgaaccccctgcatgtggactccacntggctgctgctgcngaagatccgggccnaatcnggcaccaaggnantctttgnnggtttcttcctcggatcatcaangntgccccctctgngccatcangatcancacctatgaatnngnaaaanntttttccaaangntnaanannaacggnttntggg

SEQ ID NO: 270 - DNA, 1199 bp, Homo Sapiens
  misc_feature (812)..(812): n is a, c, g, or t
  misc_feature (835)..(835): n is a, c, g, or t
  misc_feature (876)..(876): n is a, c, g, or t
  misc_feature (900)..(900): n is a, c, g, or t
  misc_feature (908)..(908): n is a, c, g, or t
  misc_feature (916)..(916): n is a, c, g, or t
  misc_feature (945)..(945): n is a, c, g, or t
  misc_feature (972)..(972): n is a, c, g, or t
  misc_feature (983)..(983): n is a, c, g, or t
  misc_feature (987)..(987): n is a, c, g, or t
  misc_feature (1001)..(1001): n is a, c, g, or t
  misc_feature (1004)..(1004): n is a, c, g, or t
  misc_feature (1021)..(1021): n is a, c, g, or t
  misc_feature (1033)..(1033): n is a, c, g, or t
  misc_feature (1060)..(1061): n is a, c, g, or t
  misc_feature (1066)..(1066): n is a, c, g, or t
  misc_feature (1069)..(1069): n is a, c, g, or t
  misc_feature (1071)..(1071): n is a, c, g, or t
  misc_feature (1077)..(1077): n is a, c, g, or t
  misc_feature (1081)..(1081): n is a, c, g, or t
  misc_feature (1091)..(1091): n is a, c, g, or t
  misc_feature (1105)..(1105): n is a, c, g, or t
  misc_feature (1108)..(1108): n is a, c, g, or t
  misc_feature (1111)..(1111): n is a, c, g, or t
  misc_feature (1131)..(1131): n is a, c, g, or t
  misc_feature (1136)..(1136): n is a, c, g, or t
  misc_feature (1138)..(1138): n is a, c, g, or t
  misc_feature (1153)..(1153): n is a, c, g, or t
  misc_feature (1158)..(1158): n is a, c, g, or t
  misc_feature (1164)..(1164): n is a, c, g, or t
  misc_feature (1166)..(1166): n is a, c, g, or t
  misc_feature (1169)..(1169): n is a, c, g, or t
  misc_feature (1175)..(1175): n is a, c, g, or t
  misc_feature (1188)..(1188): n is a, c, g, or t
  misc_feature (1193)..(1193): n is a, c, g, or t
agaaattactatgagaggatcgcatcaccatcaccatcacggatcctatttaggtgacactatagaatcgtcgacccacgcgtccgggactccggcccagaagccggctcgcagcgcctgctgttttctcacgacctggtgtcgggccgttaccgtggctccgtgcacttcgggctggtgcgcctcatccacggcgaggactcggactcggagggcgaggaggagggccgcgggagctcggggtgctccgaggccgggggcgcgggccacgaggagggccgggccagccccctgcgccgcggctacgtgcgcgtccagtggtacccggagggcgtcaagcagcatgtgaaggagaccaagctgaaactagaggaccgttctgtggtgccccgagatgtggtccggcacatgcgatccaccgacagtcagtgtggcacggtgatcgacgtcaacatcgactgtgccgtcaagctcatcggcaccaactgcatcatctatcccgtcaacagcaaggacctgcagcacatctggcccttcatgtatggggactacattgcctatgactgctggctggggaaggtctacgacttgaagaaccagatcatcctgaagctatccaacggcgccaggtgctccatgaacacggaagatggcgccaagctctacgacgtctgcccgcacgtcagcgactcgggtctcttcttcgatgattcctatggcttctacccaggccaggtgctcattggccctgccaagatcttctccagcgtccagtggctgtcaggtgtcaagcccgtgctcagcaccaagancaagttccgagtggtggtggaanaagtgcaggttgtaaagttgaaagttacatggattaccaanagtttctgtccagggggcacgganagcgtcanccccccanccttttgtcatcacccaagaaaaacttangcagggtgaaacgtctcgaatgctttnaccatgctcancggncaacttggggaacnctntctgtatttcttcccanccaaaggtgaancccctgtttaaaaaaacaaggttttgnngaatnatntnatgctncccnaaaaaccaantgttcccgggaacnttnccntggaaaaacccaaaaaaaanggggnantccaaaccaaaaacnaaacngaaatntnccncccctnaaaaaaaaccccnaaggntttccc

SEQ ID NO: 271 - DNA, 993 bp, Homo Sapiens
ctatgagaggtcgcatcaccatcaccatcacggatcctatttaggtgacactatagaatcgtcgacccacgcgtccggtcggcttgtcaggtggtggaggaaaaggcgctccgtcatggggatccagacgagccccgtcctgctggcctccctgggggtggggctggtcactctgctcggcctggctgtgggctcctacttggttcggaggtcccgccggcctcaggtcactctcctggaccccaatgaaaagtacctgctacgactgctagacaagacgactgtgagccacaacaccaagaggttccgctttgccctgcccaccgcccaccacactctggggctgcctgtgggcaaacatatctacctctccacccgaattgatggcagcctggtcatcaggccatacactcctgtcaccagtgatgaggatcaaggctatgtggatcttgtcatcaaggtctacctgaagggtgtgcaccccaaatttcctgagggagggaagatgtctcagtacctggatagcctgaaggttggggatgtggtggagtttcgggggccaagcgggttgctcacttacactggaaaagggcattttaacattcagcccaacaagaaatctccaccagaaccccgagtggcgaagaaactgggaatgattgccggcgggacaggaatcaccccaatgctacagctgatccgggccatcctgaaagtccctgaagatccaacccagtgctttctgctttttgccaaccagacagaaaaggatatcatcttgcgggaggacttagaggaactgcaggcccgctatcccaatcgctttaagctctggttcactctggatcatcccccaaaagattgggcctacagcaagggctttgtgactgccgacatgatccgggaacacctgcccgctccaggggatgatgtgctggtactgctttgtgggccacccccaatggtgcagctggcctgccatcccaacttgga

SEQ ID NO: 272 - DNA, 912 bp, Homo Sapiens
  misc_feature (1)..(1): n is a, c, g, or t
  misc_feature (300)..(300): n is a, c, g, or t
  misc_feature (647)..(647): n is a, c, g, or t
  misc_feature (657)..(657): n is a, c, g, or t
  misc_feature (720)..(720): n is a, c, g, or t
  misc_feature (725)..(725): n is a, c, g, or t
  misc_feature (727)..(727): n is a, c, g, or t
  misc_feature (731)..(731): n is a, c, g, or t
  misc_feature (768)..(768): n is a, c, g, or t
  misc_feature (780)..(780): n is a, c, g, or t
  misc_feature (783)..(783): n is a, c, g, or t
  misc_feature (803)..(803): n is a, c, g, or t
  misc_feature (808)..(808): n is a, c, g, or t
  misc_feature (813)..(813): n is a, c, g, or t
  misc_feature (818)..(818): n is a, c, g, or t
  misc_feature (835)..(835): n is a, c, g, or t
  misc_feature (839)..(839): n is a, c, g, or t
  misc_feature (842)..(842): n is a, c, g, or t
  misc_feature (846)..(846): n is a, c, g, or t
  misc_feature (856)..(856): n is a, c, g, or t
  misc_feature (869)..(869): n is a, c, g, or t
  misc_feature (871)..(873): n is a, c, g, or t
  misc_feature (877)..(877): n is a, c, g, or t
  misc_feature (880)..(880): n is a, c, g, or t
  misc_feature (891)..(891): n is a, c, g, or t
  misc_feature (898)..(898): n is a, c, g, or t
  misc_feature (901)..(902): n is a, c, g, or t
  misc_feature (908)..(908): n is a, c, g, or t
  misc_feature (912)..(912): n is a, c, g, or t
natagagaaattactatgagaggatcgcatcaccatcaccatcacggatcctatttaggtgacactatagaatcgtcgacccacgcgtccgcttcttctggggcctccacgagctggggagcaccagcgagacggagaccggggaggcccggcacagcctgtacatgttccaccccaccctgccgcgcgtgctgctggagctggccaatgtctctacccacattgtcgcctttgacgccgtcctgtttgagccaagccgccacgccgcctacatccttctgacaggcccggcagactcanaggcacccggcctggtctctgtgatcaagcacaaggtgcgggaccttgtcccaagcagcagggtggtccgcctgggtgagggtgggccagacagtgaccaagccatcagggaccggttctcccggctgcggtaccagagtgaggcgtagaggcacgccagccagagcctgtggagagactccgcctgctgacactaaacgtcctgggaagtgggcccttccctgggtctctgcactgactcccccactcctgaccctggtgatggtcgccactgggcagcagcagccttaccagtcctccatgatcacacccagggacctgcatgggtgaggggacaccctgggccntctctcccgnccagcatccttcctgagtccccacacagggcctcactctgcaccccaccagggttccgctcanaccangncaancttcatagtggtctcccctggccaccttgggcaaganttgggttaatgncancaaccccaatccttaacccngtgcnctctncttgncagacttctccccaggnccanaancggnccaattacgntaaaaaaaaacangnnnttcnccnggaaaaagccncttcccncanncccatncttn

SEQ ID NO: 273 - DNA, 905 bp, Homo Sapiens
  misc_feature (709)..(709): n is a, c, g, or t
  misc_feature (727)..(727): n is a, c, g, or t
  misc_feature (744)..(744): n is a, c, g, or t
  misc_feature (867)..(867): n is a, c, g, or t
  misc_feature (883)..(905): n is a, c, g, or t
tagagaaattactatgagaggatcgcatcaccatcaccatcacggatcctatttaggtgacactatagaatcgtcgacccacgcgtccggggcggtcgcggcgggcagtggcggcagaatgttggctaccagggtatttagcctagttggcaagcgagcaatttccacctctgtgtgtgtacgagctcatgtagagacggggtttcaccatattagccaggatggtctcgatctcctgacctcgtgatccgcctgcctgggcctcccaaagtgctgggattacaggtgtgagccaccgcgcccagccctgcagaaagtgttgtgaagagcgaagacttttcgctcccagcttatatggatcggcgtgaccaccccttgccggaggtggcccatgtcaagcacctgtctgccagccagaaggcactgaaggagaaggagaaggcctcctggagcagcctctccatggatgagaaagtcgagttgtatcgcattaagttcaaggagagctttgctgagatgaacaggggctcgaacgagtggaagacggttgtgggcggtgccatgttcttcatcggtttcaccgcgctcgttatcatgtggcagaagcactatgtgtacggccccctcccgcaaagctttgacaaagagtgggtggccaagcagaccaagaggatgctggacatgaaggtgaaccccatccagggcttancctccaagtgggactacnaaaagaacgagtggaanaagtgagagatgctggcctgcgcctgcacctgcgcctggctctgtcaccgccatgcaactccatgcctatttactggaaacctgttatgccaaacagttgtaccactgctaataaatgaccantttacctgaaaaaaannnnnnnnnnnnnnnnnnnnnnn

SEQ ID NO: 274 - DNA, 1179 bp, Homo Sapiens
  misc_feature (936)..(936): n is a, c, g, or t
  misc_feature (938)..(938): n is a, c, g, or t
  misc_feature (983)..(983): n is a, c, g, or t
  misc_feature (988)..(988): n is a, c, g, or t
  misc_feature (1052)..(1052): n is a, c, g, or t
  misc_feature (1054)..(1054): n is a, c, g, or t
  misc_feature (1067)..(1067): n is a, c, g, or t
  misc_feature (1092)..(1092): n is a, c, g, or t
  misc_feature (1096)..(1096): n is a, c, g, or t
  misc_feature (1098)..(1098): n is a, c, g, or t
  misc_feature (1101)..(1101): n is a, c, g, or t
  misc_feature (1110)..(1111): n is a, c, g, or t
  misc_feature (1117)..(1118): n is a, c, g, or t
  misc_feature (1132)..(1132): n is a, c, g, or t
  misc_feature (1150)..(1150): n is a, c, g, or t
  misc_feature (1156)..(1156): n is a, c, g, or t
  misc_feature (1160)..(1160): n is a, c, g, or t
  misc_feature (1172)..(1172): n is a, c, g, or t
  misc_feature (1177)..(1177): n is a, c, g, or t
taatagagaaattactatgagaggatcgcatcaccatcaccatcacggatcctatttaggtgacactatagaatcgtcgacccacgcgtccgaagacaaagccactgtgctaaccacggagcgcaagaagagagggaagactgtgcctgaggagctggtgaagccagaagagctcagcaaataccggcaggtggcatcccacgtggggttgcacagtgccagcattcctgggatcctggccctggacctctgcccgtccgacaccaacaagatcctcactggtggggcggataaaaatgtcgttgtgtttgacaaaagttctgaacaaatcctggctaccctcaaaggccataccaagaaggtcaccagcgtggtgtttcacccttcccaggacctggtgttttctgcttcccccgatgccactatcaggatttggtcggtccccaatgcctcttgtgtacaggtggttcgggcccatgagagtgctgtgacaggcctcagccttcatgccactggcgactatctcctgagctcctccgatgatcagtactgggctttctctgacatccagacagggcgtgtgctcaccaaggtgacagatgagacctccggctgctctctcacctgtgcacagttccaccctgacggactcatctttggaacaggaaccatggactctcagatcaagatctgggacttgaaggaacgtactaatgtggccaacttccctggccactcgggccccatcactagcatcgccttctctgagaatggttactacctggctacagcggctgatgactcctctgtcaagctctgggatctgcgcaagcttaagaactttaagactttgcagctggataacaactttgaggtaaagtcactgatctttgaccagagtggtacctacctggctcttgggggcacggaatgtcnanatctacatctgcaaacaatggacggaaattcttcactttacaaancatancggcctgaccacaggggtggccttcgggcatcacgccaagttcatcgcttcaacaggcatggananaaacctcaagttntacagcctgtaggccctggcccttntgangnaanctgggcctnntctccnntaaagggtaaaatnaggtttgggggggggggngggggnaatntttggggggganggggnct

SEQ ID NO: 275 - DNA, 1130 bp, Homo Sapiens
  misc_feature (924)..(924): n is a, c, g, or t
  misc_feature (950)..(950): n is a, c, g, or t
  misc_feature (954)..(954): n is a, c, g, or t
  misc_feature (977)..(977): n is a, c, g, or t
  misc_feature (986)..(986): n is a, c, g, or t
  misc_feature (1013)..(1013): n is a, c, g, or t
  misc_feature (1015)..(1015): n is a, c, g, or t
  misc_feature (1033)..(1033): n is a, c, g, or t
  misc_feature (1038)..(1038): n is a, c, g, or t
  misc_feature (1040)..(1040): n is a, c, g, or t
  misc_feature (1043)..(1043): n is a, c, g, or t
  misc_feature (1045)..(1046): n is a, c, g, or t
  misc_feature (1048)..(1048): n is a, c, g, or t
  misc_feature (1051)..(1051): n is a, c, g, or t
  misc_feature (1055)..(1055): n is a, c, g, or t
  misc_feature (1057)..(1057): n is a, c, g, or t
  misc_feature (1060)..(1060): n is a, c, g, or t
  misc_feature (1067)..(1067): n is a, c, g, or t
  misc_feature (1069)..(1069): n is a, c, g, or t
  misc_feature (1072)..(1072): n is a, c, g, or t
  misc_feature (1077)..(1077): n is a, c, g, or t
  misc_feature (1086)..(1086): n is a, c, g, or t
  misc_feature (1089)..(1089): n is a, c, g, or t
  misc_feature (1095)..(1095): n is a, c, g, or t
  misc_feature (1099)..(1099): n is a, c, g, or t
  misc_feature (1109)..(1109): n is a, c, g, or t
tagagagattactatgagaggatcgcatcaccatcaccatcacggatcctatttaggtgacactatagaatcgtcgacccacgcgtccgagaaacctgcagccgcagcagctcctggcactgcggagaagttgagccccaaggcggccacgcttgccgagcgcagcgccggcctggccttcagcttgtaccaggccatggccaaggaccaggcagtggagaacatcctggtgtcacccgtggtggtggcctcgtcgctggggctcgtgtcgctgggcggcaaggcgaccacggcgtcgcaggccaaggcagtgctgagcgccgagcagctgcgcgacgaggaggtgcacgccggcctgggcgagctgctgcgctcactcagcaactccacggcgcgcaacgtgacctggaagctgggcagccgactgtacggacccagctcagtgagcttcgctgatgacttcgtgcgcagcagcaagcagcactacaactgcgagcactccaagatcaacttccgcgacaagcgcagcgcgctgcagtccatcaacgagtgggccgcgcagaccaccgacggcaagctgcccgaggtcaccaaggacgtggagcgcacggacggcgccctgttagtcaacgccatgttcttcaagccacactgggatgagaaattccaccacaagatggtggacaaccgtggcttcatggtgactcggtcctataccgtgggtgtcatgatgatgcaccggacaggcctctacaactactacgacgacgagaaggaaaagctgcaaatcgtggagatgcccctggcccacaagctctccagcctcatcatcctcatgccccatcacgtggagcctctcgagcgccttgaaaagctgctaaccaaagaagcaacctgaagatctggatggggaaaatgcaaaanaaggctgttgccatctccttgccaanggtntggtgggaggtgaaccattgacntgcaaaaancacctggttgggctgggccctgaactnangccattgaaaaaaacaanggccnanttntnncncantttnanganaaaaaananctntaacntggccaagngtnttcccncccncccccttttnatttgaaacaaaatggcaacc

SEQ ID NO: 276 - DNA, 1175 bp, Homo Sapiens
  misc_feature (1)..(1): n is a, c, g, or t
  misc_feature (803)..(803): n is a, c, g, or t
  misc_feature (818)..(818): n is a, c, g, or t
  misc_feature (834)..(834): n is a, c, g, or t
  misc_feature (841)..(841): n is a, c, g, or t
  misc_feature (850)..(850): n is a, c, g, or t
  misc_feature (889)..(889): n is a, c, g, or t
  misc_feature (901)..(901): n is a, c, g, or t
  misc_feature (915)..(915): n is a, c, g, or t
  misc_feature (953)..(953): n is a, c, g, or t
  misc_feature (986)..(986): n is a, c, g, or t
  misc_feature (990)..(990): n is a, c, g, or t
  misc_feature (1017)..(1017): n is a, c, g, or t
  misc_feature (1036)..(1036): n is a, c, g, or t
  misc_feature (1039)..(1039): n is a, c, g, or t
  misc_feature (1055)..(1055): n is a, c, g, or t
  misc_feature (1057)..(1057): n is a, c, g, or t
  misc_feature (1066)..(1066): n is a, c, g, or t
  misc_feature (1082)..(1082): n is a, c, g, or t
  misc_feature (1086)..(1086): n is a, c, g, or t
  misc_feature (1093)..(1093): n is a, c, g, or t
  misc_feature (1104)..(1104): n is a, c, g, or t
  misc_feature (1113)..(1115): n is a, c, g, or t
  misc_feature (1117)..(1118): n is a, c, g, or t
  misc_feature (1137)..(1137): n is a, c, g, or t
  misc_feature (1144)..(1144): n is a, c, g, or t
  misc_feature (1148)..(1150): n is a, c, g, or t
  misc_feature (1152)..(1153): n is a, c, g, or t
  misc_feature (1157)..(1157): n is a, c, g, or t
  misc_feature (1159)..(1159): n is a, c, g, or t
  misc_feature (1163)..(1163): n is a, c, g, or t
naaatagagaaattactatgagaggatcgcatcaccatcaccatcacggatcctatttaggtgacactatagaatcgtcgacccacgcgtccgcccacgcgtccgcccacgcgtccgagctggggaaccccatgaagagaggtgcccaggtcaccttctacctcatccttagcacctccgggatcagcattgagaccacggaactggaggtagagctgctgttggccacgatcagtgagcaggagctgcatccagtctctgcacgagcccgtgtcttcattgagctgccactgtccattgcaggaatggccattccccagcaactcttcttctctggtgtggtgaggggcgagagagccatgcagtctgagcgggatgtgggcagcaaggtcaagtatgaggtcacggtttccaaccaaggccagtcgctcagaaccctgggctctgccttcctcaacatcatgtggcctcatgagattgccaatgggaagtggttgctgtacccaatgcaggttgagctggagggcgggcaggggcctgggcagaaagggctttgctctcccaggcccaacatcctccacctggatgtggacagtagggataggaggcggcgggagctggagccacctgagcagcaggagcctggtgagcggcaggagcccagcatgtcctggtggccagtgtcctctgctgagaagaagaaaaacatcaccctggactgcgcccggggcacggccaactgtgtggtgttcagctgcccactctacagctttgaccgcgcggctgtgctgcatgtctggggnccgtctctggaacancacctttctggaggantactcanctgtgaaantccctggaagtgattgtccgggccaacatcacagtgaantcctccataaanaacttgatgctccnagatgcctccacagtgatcccagtgatggtatacttgnaacccatggctgtgggggccaaaaagaatgccntggngggtcatcctcctggctgtactggctngggctgctggggctaacantgntggggctgcctcctgngnaaaaatggnatttttcaaacgggcnaaanccccccnaaggcccccgngcccccaannncnngggggggaaaaattccccnggaaaanccannncnntttnangggngaaaaaaaaggg

SEQ ID NO: 277 - DNA, 932 bp, Homo Sapiens
  misc_feature (646)..(646): n is a, c, g, or t
  misc_feature (708)..(708): n is a, c, g, or t
  misc_feature (724)..(724): n is a, c, g, or t
  misc_feature (730)..(730): n is a, c, g, or t
  misc_feature (764)..(764): n is a, c, g, or t
  misc_feature (784)..(784): n is a, c, g, or t
  misc_feature (790)..(790): n is a, c, g, or t
  misc_feature (833)..(833): n is a, c, g, or t
  misc_feature (843)..(843): n is a, c, g, or t
  misc_feature (847)..(847): n is a, c, g, or t
  misc_feature (866)..(866): n is a, c, g, or t
  misc_feature (872)..(872): n is a, c, g, or t
  misc_feature (878)..(878): n is a, c, g, or t
  misc_feature (881)..(881): n is a, c, g, or t
  misc_feature (884)..(885): n is a, c, g, or t
  misc_feature (891)..(891): n is a, c, g, or t
  misc_feature (893)..(893): n is a, c, g, or t
  misc_feature (897)..(897): n is a, c, g, or t
  misc_feature (905)..(905): n is a, c, g, or t
  misc_feature (909)..(909): n is a, c, g, or t
  misc_feature (912)..(912): n is a, c, g, or t
  misc_feature (917)..(917): n is a, c, g, or t
  misc_feature (919)..(919): n is a, c, g, or t
  misc_feature (927)..(927): n is a, c, g, or t
agaaattactatgagaggatcgcatcaccatcaccatcacggatcctatttaggtgacactatagaatcgtcgacccacgcgtccgctgtgccggagtctcctccctttggtccgctgcaggcccgcagcccgagtgtcgccgccatggcttcgccgcagctctgccgcgcgctggtgtcggcgcaatgggtggcggaggcgctgcgggccccgcgcgctgggcagcctctgcagctgctggacgcctcctggtacctgccgaagctggggcgcgacgcgcgacgcgagttcgaggagcgccacatcccgggcgccgctttcttcgacatcgaccagtgcagcgaccgcacctcgccctacgaccacatgctgcccggggccgagcatttcgcggagtacgcaggccgcctgggcgtgggcgcggccacccacgtcgtgatctacgacgccagcgaccagggcctctactccgccccgcgcgtctggtggatgttccgcgccttcggccaccacgccgtgtcactgcttgatggcggcctccgccactggctgcgccagaacctcccgctcagctccggcaagagccaacctgctcccgccgagttccgcgctcagctcgaccccgccttcatcaagacctacgangacatcaaggagaacctggaatcccggcgcttccaggtggtggactcccgagccactggcangttccgcggcaccgancccganccccgaaacggcattgaacctggccacatcccangtaccgtgaacatccccttnacaaantttctgaaccagaagggctggaaaaaaaccctgaagaaattcnccatttgttncaanaaaaaaaaatggaactgtntaaacnactggnggncanntgtggntntggngtcaaaanctgncangtggnantaaggggnctaac

SEQ ID NO: 278 - DNA, 1205 bp, Homo Sapiens
  misc_feature (3)..(3): n is a, c, g, or t
  misc_feature (961)..(961): n is a, c, g, or t
  misc_feature (967)..(967): n is a, c, g, or t
  misc_feature (970)..(970): n is a, c, g, or t
  misc_feature (975)..(976): n is a, c, g, or t
  misc_feature (986)..(986): n is a, c, g, or t
  misc_feature (995)..(995): n is a, c, g, or t
  misc_feature (1001)..(1001): n is a, c, g, or t
  misc_feature (1053)..(1053): n is a, c, g, or t
  misc_feature (1100)..(1100): n is a, c, g, or t
  misc_feature (1104)..(1104): n is a, c, g, or t
  misc_feature (1109)..(1109): n is a, c, g, or t
  misc_feature (1115)..(1115): n is a, c, g, or t
  misc_feature (1141)..(1141): n is a, c, g, or t
  misc_feature (1152)..(1152): n is a, c, g, or t
  misc_feature (1166)..(1166): n is a, c, g, or t
  misc_feature (1169)..(1169): n is a, c, g, or t
  misc_feature (1172)..(1172): n is a, c, g, or t
  misc_feature (1176)..(1176): n is a, c, g, or t
  misc_feature (1180)..(1180): n is a, c, g, or t
  misc_feature (1187)..(1187): n is a, c, g, or t
  misc_feature (1191)..(1191): n is a, c, g, or t
  misc_feature (1196)..(1196): n is a, c, g, or t
  misc_feature (1200)..(1201): n is a, c, g, or t
  misc_feature (1205)..(1205): n is a, c, g, or t
cantagagaaattactatgagaggatcgcatcaccatcaccatcacggatcctatttaggtgacactatagaatcgtcgacccacgcgtccgaccagcagcagcgtcaggaatctctagaaagaagaacctcggccacagggcccatcctcccaccaggacatccttcatctgcagccagcgcccccgtctcatgtagtgggcctccaccgccccccccacccccagtcccacctccacccactggggctaccccacctcccccacccccactgccagccggaggagcccaggggtccagccacgacgagagctccatgtcaggactggccgctgccatagctggggccaagctgagaagagtccaacggccagaagacgcatctggaggctccagtcccagtgggacctcaaagtccgatgccaaccgggcaagcagcgggggtggcggaggaggcctcatggaggaaatgaacaaactgctggccaagaggagaaaagcagcctcccagtcagacaagccagccgagaagaaggaagatgaaagccaaatggaagatcctagtacctccccctctccggggacccgagcagccagccagccacctaactcctcagaggctggccggaagccctgggagcggagcaactcggtggagaagcctgtgtcctcgattctgtccagaaccccgtctgtggcaaagagccccgaagctaagagcccccttcagtcgcagcctcactctaggatgaagcctgctgggagcgtgaatgacatggccctggatgccttcgacttggaccggatgaagcaggagatcctagaggaggtggtgagagagctccacaaggtgaaggaggagatcatcgacgccatcaggcaggagctgagtgggatcagcaccacgtaaggggccggcctcgctgcgctgattcgtcgagcccatccggcgacagagganagccanaanccagnnagccccaaanttccagtgnacaaancacgcacagaacctgggcgcgctgctgtgaaacgtcctgacctgtgatccantgacagtgagaaacaagtgcactctggttttttaaatttgctgaaangaanacagncgcccnctttttggtttaattgctataagganttttttggttnaaaacccctaatcntgnttntaangttncggtttncccngggantttnncctn

SEQ ID NO: 279 - DNA, 1195 bp, Homo Sapiens
  misc_feature (948)..(948): n is a, c, g, or t
  misc_feature (1006)..(1006): n is a, c, g, or t
  misc_feature (1031)..(1032): n is a, c, g, or t
  misc_feature (1041)..(1041): n is a, c, g, or t
  misc_feature (1047)..(1047): n is a, c, g, or t
  misc_feature (1076)..(1076): n is a, c, g, or t
  misc_feature (1091)..(1091): n is a, c, g, or t
  misc_feature (1109)..(1109): n is a, c, g, or t
  misc_feature (1116)..(1116): n is a, c, g, or t
  misc_feature (1123)..(1123): n is a, c, g, or t
  misc_feature (1128)..(1128): n is a, c, g, or t
  misc_feature (1138)..(1138): n is a, c, g, or t
  misc_feature (1145)..(1145): n is a, c, g, or t
  misc_feature (1158)..(1158): n is a, c, g, or t
  misc_feature (1160)..(1160): n is a, c, g, or t
  misc_feature (1168)..(1168): n is a, c, g, or t
  misc_feature (1174)..(1176): n is a, c, g, or t
  misc_feature (1179)..(1180): n is a, c, g, or t
  misc_feature (1187)..(1187): n is a, c, g, or t
  misc_feature (1192)..(1192): n is a, c, g, or t
aatatagagaaattactatgagaggatcgcatcaccatcaccatcacggatcctatttaggtgacactatagaatcgtcgacccacgcgtccgcactacaaggctcggagctccgggcactcagacatcatgagttggtccttgcacccccggaatttaattctctacttctatgctcttttatttctctcttcaacatgtgtagcatatgttgctaccagagacaactgctgcatcttagatgaaagattcggtagttattgtccaactacctgtggcattgcagatttcctgtctacttatcaaaccaaagtagacaaggatctacagtctttggaagacatcttacatcaagttgaaaacaaaacatcagaagtcaaacagctgataaaagcaatccaactcacttataatcctgatgaatcatcaaaaccaaatatgatagacgctgctactttgaagtccaggaaaatgttagaagaaattatgaaatatgaagcatcgattttaacacatgactcaagtattcgatatttgcaggaaatatataattcaaataatcaaaagattgttaacctgaaagagaaggtagcccagcttgaagcacagtgccaggaaccttgcaaagacacggtgcaaatccatgatatcactgggaaagattgtcaagacattgccaataagggagctaaacagagcgggctttactttattaaacctctgaaagctaaccagcaattcttagtctactgtgaaatcgatgggtctggaaatggatggactgtgtttcagaagagacttgatggcagtgtagatttcaagaaaaactggattcaatataaagaaggatttggacatctgtctcctactgggcacaacagaattttggctgggaaatgaaaagattcatttgataagcccacagtctgccatcccatatgcattaanagtggaaactgggaaaactggaaatgggccaaacccagtactgccaaaacttaggccntggttcaagggggggaacctggaannctgaacaangtaccnccctaaaaatatgccctacctttcccctnggggggggaatgctngaaaaagcccctttgaanggctttngaatttnggccnaagaatcccnagggganaagttttttccantnccccaaanagggcnnngcnngttccanacccnggg

SEQ ID NO: 280 - DNA, 1179 bp, Homo Sapiens
  misc_feature (1)..(2): n is a, c, g, or t
  misc_feature (826)..(826): n is a, c, g, or t
  misc_feature (885)..(885): n is a, c, g, or t
  misc_feature (892)..(892): n is a, c, g, or t
  misc_feature (895)..(895): n is a, c, g, or t
  misc_feature (898)..(898): n is a, c, g, or t
  misc_feature (910)..(910): n is a, c, g, or t
  misc_feature (918)..(918): n is a, c, g, or t
  misc_feature (948)..(948): n is a, c, g, or t
  misc_feature (968)..(968): n is a, c, g, or t
  misc_feature (989)..(989): n is a, c, g, or t
  misc_feature (996)..(996): n is a, c, g, or t
  misc_feature (1007)..(1007): n is a, c, g, or t
  misc_feature (1013)..(1013): n is a, c, g, or t
  misc_feature (1027)..(1027): n is a, c, g, or t
  misc_feature (1034)..(1034): n is a, c, g, or t
  misc_feature (1041)..(1041): n is a, c, g, or t
  misc_feature (1055)..(1055): n is a, c, g, or t
  misc_feature (1057)..(1057): n is a, c, g, or t
  misc_feature (1059)..(1059): n is a, c, g, or t
  misc_feature (1087)..(1087): n is a, c, g, or t
  misc_feature (1097)..(1097): n is a, c, g, or t
  misc_feature (1107)..(1109): n is a, c, g, or t
  misc_feature (1114)..(1114): n is a, c, g, or t
  misc_feature (1118)..(1118): n is a, c, g, or t
  misc_feature (1120)..(1120): n is a, c, g, or t
  misc_feature (1124)..(1125): n is a, c, g, or t
  misc_feature (1136)..(1136): n is a, c, g, or t
  misc_feature (1139)..(1139): n is a, c, g, or t
  misc_feature (1146)..(1146): n is a, c, g, or t
  misc_feature (1148)..(1148): n is a, c, g, or t
  misc_feature (1175)..(1175): n is a, c, g, or t
  misc_feature (1178)..(1178): n is a, c, g, or t
nnatagagaaattactatgagaggatcgcatcaccatcaccatcacggatcctatttaggtgacactatagaatcgtcgacccacgcgtccgcctggagtctctgtggcgcggtttcctgtacctgccttgggatccggagggaggaagctgggacacccgggagtcaggaaatggactcggtggcttttgaggatgtagatgtgaacttcacccaggaggagtgggctttgctagatccttcccagaagaatctctacagagatgtgatgtgggaaaccatgaggaatctggcctctatagggaaaaaatggaaggaccagaacattaaagatcactacaaacaccgagggagaaatctaagaagtcatatgttagaaagactctatcaaactaaggatggtagtcagcgtggaggaatttttagccagtttgcaaatcagaatctgagcaagaaaatccctggagtgaaactctgtgaaagcattgtatatggagaagtcagcatgggtcagtcatcccttaatagacacatcaaagatcacagtggacatgaaccaaaggaatatcaggaatatggagagaagccagatacacgtaaccagtgttggaaacccttcagttctcaccactcctttcgaacacatgagataattcacactggagagaaactctatgattgtaaggaatgtggaaaaaccttcttttctctcaaaagaattagaagacacatcatcacacacagtggatatacaccatataaatgtaaggtgtgtgggaaagcttttgattatcccagtagatttccaaacacatgaaagaagtcncactggagagaaaccctatgaatgtcaggaatgtggaaaagccttcccttgtatcacangtgttcnaanacncatgataaagcncactgganatggaccttataaatgtaaggtatgtgggnaaaccctttcattccctganttcatttcaagtgcatgaaanaatcccnctggaaaaaancccttnaaatgtaaccatgnggtaaanccttcanttgttcccccaccntncnaaaacctgaaaaaacccctactggaaanaaaccttttnaatgccaccnnnggggnaagncnttcnntttttcccccnccntccacancngaaaaaaattcccccggggaaaaaccntcnc

SEQ ID NO: 281 - DNA, 953 bp, Homo Sapiens
  misc_feature (871)..(871): n is a, c, g, or t
  misc_feature (923)..(923): n is a, c, g, or t
  misc_feature (928)..(928): n is a, c, g, or t
  misc_feature (941)..(941): n is a, c, g, or t
tagagaaattactatgagaggatcgcatcaccatcaccatcacggatcctatttaggtgacactatagaatcgtcgacccacgcgtccgggcgccgcggagggtcaggtcgtttctgcgcgggctcccggcgctgctactgctgctgctcttcctcgggccctggcccgctgcgagccacggcggcaagtactcgcgggagaagaaccagcccaagccgtccccgaaacgcgagtccggagaggagttccgcatggagaagttgaaccagctgtgggagaaggcccagcgactgcatcttcctcccgtgaggctggccgagctccacgctgatctgaagatacaggagagggacgaactcgcctggaagaaactaaagcttgacggcttggacgaagatggggagaaggaagcgagactcatacgcaacctcaatgtcatcttggccaagtatggtctggacggaaagaaggacgctcggcaggtgaccagcaactccctcagtggcacccaggaagacgggctggatgaccccaggctggaaaagctgtggcacaaggcgaagacctctgggaaattctccggcgaagaactggacaagctctggcgggagttcctgcatcacaaagagaaagttcacgagtacaacgtcctgctggagaccctgagcaggaccgaagaaatccacgagaacgtcattagcccctcggacctgagcgacatcaagggcagcgtcctgcacagcaggcacacggagctgaaggagaagctgcgcagcatcaaccagggcctggaccgcctgcgcagggtcagccaccagggctacagcactgaggccgagttcgaggagcccagggtgattgacctgtggnacctggcgcagtccgccaaacctcacggaaaggagctggaggcgttcccggnagganctcaagcacttcnaagccaaatcga

SEQ ID NO: 282 - DNA, 976 bp, Homo Sapiens
tgagaggatcgcatcaccatcaccatcacggatcctatttaggtgacactatagaatcgtcgacccacgcgtccgagttcccggtgcacggcgccggcgagctgtgcgtgggccagaacacgtccgacaagggcaccccgacgccctcgctgcttccagagttctggaccagcaaccctcagcacggcggcggagggcaccgtggcggcttcccggggggcgccggcgcgtcggagcgaggcaagttctcctgcccgcgcgccctcaaggtgccctcctacctcaactaccacttcctgggggagaaggactgcggcgcaccttgtgagccgaccaaggtgtatgggctcatgtacttcgggcccgaggagctgcgcttctcgcgcacctggattggcatttggtcagtgctgtgctgcgcctccacgctcttcacggtgcttacgtacctggtggacatgcggcgcttcagctacccggagcggcccatcatcttcttgtccggctgttacacggccgtggccgtggcctacatcgccggcttcctcctggaagaccgagtggtgtgtaatgacaagttcgccgaggacggggcacgcactgtggcgcagggcaccaagaaggagggctgcaccatcctcttcatgatgctctacttcttcagcatggccagctccatctggtgggtgatcctgtcgctcacctggttcctggcggctggcatgaagtggggccacgaggccatcgaagccaactcacagtattttcacctggccgcctgggctgtgccggccatcaagaccatcaccatcctggcgctgggccaggtggacggcgatgtgctgagcggagtgtgcttcgtggggcttaacaacgtggacgcgctgcgtggcttcgtgctggcgcccctcttcgtgtacctgtttatcggcacgtcctttctgctggccggctttgtgtcgctcttccgcatccg

SEQ ID NO: 283 - DNA, 1284 bp, Homo Sapiens
  misc_feature (936)..(936): n is a, c, g, or t
  misc_feature (938)..(938): n is a, c, g, or t
  misc_feature (952)..(952): n is a, c, g, or t
  misc_feature (989)..(989): n is a, c, g, or t
  misc_feature (1005)..(1005): n is a, c, g, or t
  misc_feature (1030)..(1030): n is a, c, g, or t
  misc_feature (1046)..(1046): n is a, c, g, or t
  misc_feature (1048)..(1048): n is a, c, g, or t
  misc_feature (1053)..(1053): n is a, c, g, or t
  misc_feature (1055)..(1055): n is a, c, g, or t
  misc_feature (1070)..(1070): n is a, c, g, or t
  misc_feature (1083)..(1083): n is a, c, g, or t
  misc_feature (1091)..(1091): n is a, c, g, or t
  misc_feature (1128)..(1129): n is a, c, g, or t
  misc_feature (1151)..(1151): n is a, c, g, or t
  misc_feature (1157)..(1159): n is a, c, g, or t
  misc_feature (1165)..(1165): n is a, c, g, or t
  misc_feature (1169)..(1170): n is a, c, g, or t
  misc_feature (1172)..(1172): n is a, c, g, or t
  misc_feature (1180)..(1181): n is a, c, g, or t
  misc_feature (1200)..(1200): n is a, c, g, or t
  misc_feature (1211)..(1212): n is a, c, g, or t
  misc_feature (1217)..(1217): n is a, c, g, or t
  misc_feature (1225)..(1225): n is a, c, g, or t
  misc_feature (1227)..(1227): n is a, c, g, or t
  misc_feature (1241)..(1241): n is a, c, g, or t
  misc_feature (1257)..(1257): n is a, c, g, or t
  misc_feature (1269)..(1269): n is a, c, g, or t
  misc_feature (1279)..(1280): n is a, c, g, or t
tagagaaattactatgagaggatcgcatcaccatcaccatcacggatcctatttaggtgacactatagaatcgtcgacccacgcgtccggcagcatggcggcgggggcggctgaggcagctgtagcggccgtggaggaggtcggctcagccgggcagtttgaggagctgctgcgcctcaaagccaagtccctccttgtggtccatttctgggcaccatgggctccacagtgtgcacagatgaacgaagttatggcagagttagctaaagaactccctcaagtttcatttgtgaagttggaagctgaaggtgttcctgaagtatctgaaaaatatgaaattagctctgttcccacttttctgtttttcaagaattctcagaaaatcgaccgattagatggtgcacatgccccagagttgaccaaaaaagttcagcgacatgcatctagtggctccttcctacccagcgctaatgaacatcttaaagaagatctcaaccttcgcttgaagaaattgactcatgctgccccctgcatgctgtttatgaaaggaactcctcaagaaccacgctgtggtttcagcaagcagatggtggaaattcttcacaaacataatattcagtttagcagttttgatatcttctcagatgaagaggttcgacagggactcaaagcctattccagttggcctacctatcctcagctctatgtttctggagagctcataggaggacttgatataattaaggagctagaagcatctgaagaactagatacaatttgtcccaaagctcccaaattagaggaaaggctcaaagtgctgacaaataaaagcttctgtgatgctctttatgaaaggaaacaaacaggaagcaaaatgtggattcagcaaacaaattctggaaatactaatagtactggggttgaatatgaaacatncnatatattggaggangaaaaaattcggcaaggattaaagcttactcaaaatnggccaacatacccccnacctgtatgtgaaaggggaactggnggaggattggaaattngngaagnanctgaaaaaaaatggngaattgctgcctntactgganagaaaaaaataaaaaatcttaaacttggggcccactnntggaaaaaaattttattacttngggacnnnttctgnattnntnccccaaannggactaagaaaaaaaaatncccgccttccnnaaaangtttgggnanttccaaggccggcnaaaaaaaggaggtaanttttttcccccnaaaaaaaggnnaaaa

SEQ ID NO: 284 - DNA, 1126 bp, Homo Sapiens
  misc_feature (801)..(801): n is a, c, g, or t
  misc_feature (994)..(994): n is a, c, g, or t
  misc_feature (1021)..(1021): n is a, c, g, or t
  misc_feature (1033)..(1034): n is a, c, g, or t
  misc_feature (1036)..(1036): n is a, c, g, or t
  misc_feature (1038)..(1038): n is a, c, g, or t
  misc_feature (1043)..(1043): n is a, c, g, or t
  misc_feature (1045)..(1045): n is a, c, g, or t
  misc_feature (1053)..(1053): n is a, c, g, or t
  misc_feature (1055)..(1055): n is a, c, g, or t
  misc_feature (1081)..(1081): n is a, c, g, or t
  misc_feature (1103)..(1103): n is a, c, g, or t
  misc_feature (1108)..(1108): n is a, c, g, or t
  misc_feature (1110)..(1111): n is a, c, g, or t
  misc_feature (1116)..(1116): n is a, c, g, or t
  misc_feature (1122)..(1122): n is a, c, g, or t
tagagaaattaactatgagaggatcgcatcaccatcaccatcacggatcctatttaggtgacactatagaatcgtcgacccacgcgtccgccgtgctctgggccggcgccttcaccatggcctcggcagagctggactacaccatcgagatcccggatcagccctgctggagccagaagaacagccccagcccaggtgggaaggaggcagaaactcggcagcctgtggtgattctcttgggctggggtggctgcaaggacaagaaccttgccaagtacagtgccatctaccacaaaaggggctgcatcgtaatccgatacacagccccgtggcacatggtcttcttctccgagtcactgggtatcccttcacttcgtgttttggcccagaagctgctcgagctgctctttgattatgagattgagaaggagcccctgctcttccatgtcttcagcaacggtggcgtcatgctgtaccgctacgtgctggagctcctgcagacccgtcgcttctgccgcctgcgtgtggtgggcaccatctttgacagcgctcctggtgacagcaacctggtaggggctctgcgggccctggcagccatcctggagcgccgggccgccatgctgcgcctgttgctgctggtggcctttgccctggtggtcgtcctgttccacgtcctgcttgctcccatcacagccctcttccacacccacttctatgacaggctacaggacgcgggctctcgctggcccgagctctacctctactcgagggctgacgaagtagtcctggccagagacatanaacgcatggtggaggcacgcctggcacgccgggtcctggcgcgttctgtggatttcgtgtcatctgcacacgtcagccacctccgtgactaccctacttactacacaagcctctgtgtcgacttcatgcgcaactgcgtccgctgctgaagccattgctccatctcacctctgctccaaaaaaaatgcctganacctcccaaacctgcaatctgtcgggnactcttctcgtnnantncctgnancctttggnanttgcggtccctaaataaaaattctangggcctgtttcctggggcctcngttcngnnggggnctgctnacca

SEQ ID NO: 285 - DNA, 586 bp, Homo Sapiens
  misc_feature (5)..(7): n is a, c, g, or t
  misc_feature (12)..(12): n is a, c, g, or t
  misc_feature (345)..(345): n is a, c, g, or t
  misc_feature (361)..(361): n is a, c, g, or t
  misc_feature (429)..(429): n is a, c, g, or t
  misc_feature (475)..(475): n is a, c, g, or t
  misc_feature (496)..(496): n is a, c, g, or t
  misc_feature (505)..(505): n is a, c, g, or t
  misc_feature (520)..(520): n is a, c, g, or t
  misc_feature (531)..(531): n is a, c, g, or t
  misc_feature (534)..(534): n is a, c, g, or t
  misc_feature (538)..(539): n is a, c, g, or t
  misc_feature (541)..(541): n is a, c, g, or t
  misc_feature (545)..(545): n is a, c, g, or t
  misc_feature (552)..(553): n is a, c, g, or t
  misc_feature (558)..(558): n is a, c, g, or t
  misc_feature (562)..(562): n is a, c, g, or t
  misc_feature (568)..(568): n is a, c, g, or t
  misc_feature (570)..(570): n is a, c, g, or t
  misc_feature (572)..(572): n is a, c, g, or t
  misc_feature (581)..(581): n is a, c, g, or t
aaaannnagganaataactatgagaggatcgcatcaccatcaccatcacggatcctatttaggtgacactatagaatcgtcgacccacgcgtccggcgccctgtcctccgtcggctctgcgggctcccgggcctacagcggcctgcggcagaaatgcccctccgggctaggagcgacggcgccggcccgctatactcgcaccacctccccacctccccgctgcagaaagcgctgttggccgccggctccgcggcgatggcgctctataacccctaccgccacgacatggtcgcagttctaggggagaccacaggacaccgcaccctgaaggtcctcagggaccanatgaggagggatccanagggtgcccagatcctgcaggagcgtccccggatttcgacatccaccctcgacctgggcaagctccanagcctgccggaaggctccctcggtcgcgagtatctccgtttcctgnatgtgaacagggtctccccanacacccgancacccacccgcttcntggatgatganganctanngnatgngattcannggtancggnaggtgnananatgcttcanaccct

SEQ ID NO: 286 - DNA, 1187 bp, Homo Sapiens
  misc_feature (868)..(868): n is a, c, g, or t
  misc_feature (896)..(896): n is a, c, g, or t
  misc_feature (926)..(926): n is a, c, g, or t
  misc_feature (968)..(968): n is a, c, g, or t
  misc_feature (989)..(989): n is a, c, g, or t
  misc_feature (998)..(998): n is a, c, g, or t
  misc_feature (1010)..(1010): n is a, c, g, or t
  misc_feature (1012)..(1012): n is a, c, g, or t
  misc_feature (1016)..(1016): n is a, c, g, or t
  misc_feature (1039)..(1039): n is a, c, g, or t
  misc_feature (1042)..(1042): n is a, c, g, or t
  misc_feature (1046)..(1047): n is a, c, g, or t
  misc_feature (1068)..(1068): n is a, c, g, or t
  misc_feature (1077)..(1077): n is a, c, g, or t
  misc_feature (1080)..(1080): n is a, c, g, or t
  misc_feature (1096)..(1096): n is a, c, g, or t
  misc_feature (1108)..(1108): n is a, c, g, or t
  misc_feature (1118)..(1118): n is a, c, g, or t
  misc_feature (1122)..(1122): n is a, c, g, or t
  misc_feature (1126)..(1126): n is a, c, g, or t
  misc_feature (1129)..(1129): n is a, c, g, or t
  misc_feature (1132)..(1132): n is a, c, g, or t
  misc_feature (1135)..(1135): n is a, c, g, or t
  misc_feature (1138)..(1138): n is a, c, g, or t
  misc_feature (1143)..(1143): n is a, c, g, or t
  misc_feature (1145)..(1145): n is a, c, g, or t
  misc_feature (1147)..(1147): n is a, c, g, or t
  misc_feature (1156)..(1156): n is a, c, g, or t
  misc_feature (1177)..(1177): n is a, c, g, or t
  misc_feature (1184)..(1184): n is a, c, g, or t
gagaaattactatgagaggatcgcatcaccatcaccatcacggatcctatttaggtgacactatagaatcgtcgacccacgcgtccggcccgggacccgaacccagcctctcccctacccgaacaccggccccggctccaccgaggcccgggtcccccagcccgtctcgccgccgccatggcggaccctaaatacgccgaccttcccggcattgccaggaatgagccagatgtttatgaaactagcgacctacctgaggatgatcaagcggagttcgatgcgtttgcacaagagctggaggagctgacaagcacaagtgtggaacacatcattgtcaatcctaatgctgcctatgacaagttcaaggacaagagagtggggacaaagggacttgatttctcagatcgtattggaaaaaccaagaggacaggatatgaatctggagaatatgagatgcttggagagggtctgggagtgaaggagacaccccagcaaaagtaccagcgcctactgcatgaggtccaagagctgacaactgaagttgaaaaaatcaagacgacagtgaaggagtcagccacagaggagaagctgacccctgtgttgctggctaaacagctggcagccctgaagcagcagctggttgcttcccacctggagaagctgctgggaccagatgctgcaatcaaccttaccgaccccgatggcgccctggctaagcgcctactactgcagctggaagcaacaaagaacagcaaagggggatcagggggaaaaaccactgggacccccccagatagcagccttgtcacttatgaactacattctcggcctgagcaggacaagttctctcaagctgccaaagtcgcanaacttgaaagcgcctgacagagctgganacagctgtacgttgtgatcaggatgctcanaatcccctttctgcaggtctacagggagcctgtctcatgganactgtaaagctgttgcaagcnaaaggtgancgcccctaaacntngcanttttggatcaagtggaggctcgnctnacanngtgtcctgggaaaggggaacnaattgccanccntaagcctctgttaaanatgcaaatcccnaagcaggggncccncttnttnaanttnacngggtngnanccctttgcncccccctcctggagttggggnaaaattntcc

SEQ ID NO: 287 - DNA, 955 bp, Homo Sapiens
  misc_feature (813)..(813): n is a, c, g, or t
  misc_feature (844)..(844): n is a, c, g, or t
  misc_feature (891)..(891): n is a, c, g, or t
  misc_feature (917)..(917): n is a, c, g, or t
  misc_feature (924)..(924): n is a, c, g, or t
  misc_feature (927)..(927): n is a, c, g, or t
  misc_feature (929)..(929): n is a, c, g, or t
  misc_feature (932)..(932): n is a, c, g, or t
  misc_feature (934)..(934): n is a, c, g, or t
  misc_feature (938)..(938): n is a, c, g, or t
  misc_feature (943)..(944): n is a, c, g, or t
  misc_feature (950)..(950): n is a, c, g, or t
  misc_feature (955)..(955): n is a, c, g, or t
tagagaaaattactatgagaggatcgcatcaccatcaccattcacggatcctatttaggtgacactatagaatcgtcgacccacgcgtccgggtgtgttcaccggatcagagatagcagagcgccgagttggggccacgaaggcgtgaggggagtcgtcgtccctcctgcacgaaagcgtctaagccttggcgacgccgccctgggggacccacgtcaggcctgggatagggaccgctgtccccgggtccctaccaatgtcgcccgtcgctcccggcccagctctacccgcagagtctgatggcagcggccactctgaggacgccaactcagggcactgtgacctttgaagatgtggccgtacacttctcctgggaggaatggggtctccttgatgaggctcaaagatgcctgtaccgtgatgtgatgctggagaacttggctcttttaacctctctagatgttcatcatcagaagcagcaccttggagaaaaacatttcagaagcaatgtgggcagagccttgtttgtgaagacctgcacattccatgtgtcaggggagccttccacctgcagagaagttgggaaggacttcctggccaagttgggatttctccatcaacaggctgctcacactggggagcaatcaaatagcaaaagcgacggtggggccatcagtcacagaggaaaaactcattacaactgtggagaacacacaaaagcattcagcggtaaaacacacacttgttcagcagcagagaaccctcactacagaaagatgttacatatgcagtgaatgtgggaaaatcctttancaaaagctacagtctcaatgaccattggaanacttcacactggaaaaaaagcctttatgaatgtccaaaagtgtgggnaagtccttttaggcaaagcctctaantctcatncancnccngnaaantttcnnctgcantaacn

SEQ ID NO: 288 - DNA, 1174 bp, Homo Sapiens
  misc_feature (1)..(1): n is a, c, g, or t
  misc_feature (877)..(877): n is a, c, g, or t
  misc_feature (883)..(883): n is a, c, g, or t
  misc_feature (899)..(899): n is a, c, g, or t
  misc_feature (948)..(948): n is a, c, g, or t
  misc_feature (956)..(956): n is a, c, g, or t
  misc_feature (980)..(980): n is a, c, g, or t
  misc_feature (993)..(993): n is a, c, g, or t
  misc_feature (1002)..(1002): n is a, c, g, or t
  misc_feature (1023)..(1023): n is a, c, g, or t
  misc_feature (1025)..(1025): n is a, c, g, or t
  misc_feature (1047)..(1047): n is a, c, g, or t
  misc_feature (1049)..(1049): n is a, c, g, or t
  misc_feature (1061)..(1061): n is a, c, g, or t
  misc_feature (1063)..(1063): n is a, c, g, or t
  misc_feature (1067)..(1067): n is a, c, g, or t
  misc_feature (1071)..(1071): n is a, c, g, or t
  misc_feature (1080)..(1080): n is a, c, g, or t
  misc_feature (1095)..(1095): n is a, c, g, or t
  misc_feature (1100)..(1100): n is a, c, g, or t
  misc_feature (1107)..(1107): n is a, c, g, or t
  misc_feature (1112)..(1112): n is a, c, g, or t
  misc_feature (1136)..(1136): n is a, c, g, or t
  misc_feature (1138)..(1138): n is a, c, g, or t
  misc_feature (1140)..(1140): n is a, c, g, or t
  misc_feature (1146)..(1146): n is a, c, g, or t
  misc_feature (1152)..(1153): n is a, c, g, or t
  misc_feature (1156)..(1156): n is a, c, g, or t
  misc_feature (1160)..(1160): n is a, c, g, or t
naatagagaaattactatgagaggatcgcatcaccatcaccatcacggatcctatttaggtgacactatagaatcgtcgacccacgcgtccgtaaacaccgctgtaaagtcgggcaggtgggtgatgctgaagaatgtgcatctggccccagggtggctgatgcagctggagaagaagttgcattccctgcagccgcatgcctgcttccgactcttcctcaccatggagatcaaccccaaggtgcctgtgaatctgctccgtgcgggccgcatctttgtgttcgagccaccgccaggggtgaaggccaacatgctgaggacgttcagcagcattcccgtctcacggatatgcaagtctcccaacgagcgtgcccgcttgtacttcctgctggcctggtttcatgcgatcatccaagaacgcttacgatacgcaccactggggtggtcaaagaagtatgaatttggagagtctgacctgcggtcagcttgcgatacggtggacacgtggctggatgacacggccaagggcaggcagaacatctcaccggataagatcccgtggtctgcactaaagaccttaatggcccagtccatttatggcgggcgcgtggacaacgagtttgaccagcgtctgctcaacaccttcctggagcgcctgttcacaaccaggagtttcgacagtgagtttaagctggcatgcaaggtcgacggacataaagacattcaaatgccagatggcatcaggcgagaggagtttgtgcagtgggtggagttgctccccgacacccagacgccctcctggctgggcctgcccaacaacgccgagagagtcctccttaccacacagggtgtggacatgatcagtaaaatgctgaanatgcanatgttggaagaatgangacgacctggcctacgcagagactgagaagaagacgaggacagactccncgtccgangggcgcccctgcctggatgcgganactgcacaccacngcgtccaantggctgcacctcatcccccanangctgaaccacctcaagcgcacngnggaaaaaatcangnatcntttnttcaggttnttttaaaaaaaaatnaaaanggggccnaaacnttttttaggaatttccccagaacntntnaaattntttccnnggnggcnaaagaaaaaaaaaa

SEQ ID NO: 289 - DNA, 567 bp, Homo Sapiens
  misc_feature (566)..(566): n is a, c, g, or t
tagagaaattactatgagaggatcgcatcaccatcaccatcacggatcctatttaggtgacactatagaatcgtcgacccacgcgtccgcccacgcgtccgaggcccgggtggttgctgccgaaatgggcaagttcatgaaacctgggaaggtggtgcttgtcctggctggacgctactccggacgcaaagctgtcatcgtgaagaacattgatgatggcacctcagatcgcccctacagccatgctctggtggctggaattgaccgctacccccgcaaagtgacagctgccatgggcaagaagaagatcgccaagagatcaaagataaaatcttttgtgaaagtgtataactacaatcacctaatgcccacaaggtactctgtggatatccccttggacaaaactgtcgtcaataaggatgtcttcagagatcctgctcttaaacgcaaggcccgacgggaggccaaggtcaagtttgaagagagatacaagacaggcaagaacaagtggttcttccagaaactgcggttttagatgctttgttttgatcattaaaaattataang

SEQ ID NO: 290 - DNA, 993 bp, Homo Sapiens
  misc_feature (749)..(749): n is a, c, g, or t
  misc_feature (801)..(801): n is a, c, g, or t
  misc_feature (816)..(816): n is a, c, g, or t
  misc_feature (835)..(835): n is a, c, g, or t
  misc_feature (841)..(841): n is a, c, g, or t
  misc_feature (847)..(847): n is a, c, g, or t
  misc_feature (850)..(850): n is a, c, g, or t
  misc_feature (866)..(866): n is a, c, g, or t
  misc_feature (875)..(875): n is a, c, g, or t
  misc_feature (898)..(898): n is a, c, g, or t
  misc_feature (918)..(918): n is a, c, g, or t
  misc_feature (921)..(921): n is a, c, g, or t
  misc_feature (923)..(924): n is a, c, g, or t
  misc_feature (926)..(926): n is a, c, g, or t
  misc_feature (928)..(928): n is a, c, g, or t
  misc_feature (937)..(937): n is a, c, g, or t
  misc_feature (947)..(947): n is a, c, g, or t
  misc_feature (951)..(951): n is a, c, g, or t
  misc_feature (956)..(956): n is a, c, g, or t
  misc_feature (958)..(959): n is a, c, g, or t
  misc_feature (961)..(961): n is a, c, g, or t
  misc_feature (982)..(982): n is a, c, g, or t
  misc_feature (991)..(993): n is a, c, g, or t
aatagagaaattactatgagaggatcgcatcaccatcaccatcacgggatcctatttaggtgacactatagaatcgtcgacccacgcgtccgcttcctcattaagagcttcaatgacttcaactcctccccctccagtacctcccccacctccacctccagccactgctttgcaagctccagcagtaccaccacctccagctcctcttcagattgcccctggagttcttcacccagctcctcctccaattgcacctcctctagtacagccctctccaccagtagctagagctgccccagtatgtgagactgtaccagttcatccactcccacaaggtgaagttcaggggctgcctccacccccaccaccgcctcctctgcctccacctggcattcgaccatcatcacctgtcacagttacagctcttgctcatcctccctctgggctacatccaactccatctactgccccaggtccccatgttccattaatgcctccatctcctccatcacaagttatacctgcttctgagccaaagcgccatccatcaaccctacctgtaatcagtgatgccaggagtgtgctactggaagcaatacgaaaaggtattcagctacgcaaagtagaagagcagcgtgaacaggaagctaagcatgaacgcattgaaaacgatgttgccaccatcctgtctcgccgtattgctgttgaatatagtgattcggaagatgattcagaatttgatgaagtanattggttggagtaagaaaaaatgcattgataaatattacaaaactgaatgcnaatgtcctttgtggngcttgttccttgaaaatgnttgggncattcnagngttttgctttcttttnccttataanaaatgacccttttcctccataanttttgatttctaaggaaaanatnannananatttcaaantaaaggtttnaaanggggntnncnttttttttcccctgaaaagantaatttggnnn

SEQ ID NO: 291 - DNA, 1226 bp, Homo Sapiens
  misc_feature (285)..(285): n is a, c, g, or t
  misc_feature (839)..(839): n is a, c, g, or t
  misc_feature (848)..(848): n is a, c, g, or t
  misc_feature (853)..(853): n is a, c, g, or t
  misc_feature (875)..(875): n is a, c, g, or t
  misc_feature (895)..(895): n is a, c, g, or t
  misc_feature (915)..(915): n is a, c, g, or t
  misc_feature (964)..(964): n is a, c, g, or t
  misc_feature (990)..(990): n is a, c, g, or t
  misc_feature (994)..(994): n is a, c, g, or t
  misc_feature (1008)..(1008): n is a, c, g, or t
  misc_feature (1032)..(1032): n is a, c, g, or t
  misc_feature (1042)..(1042): n is a, c, g, or t
  misc_feature (1061)..(1061): n is a, c, g, or t
  misc_feature (1067)..(1067): n is a, c, g, or t
  misc_feature (1072)..(1072): n is a, c, g, or t
  misc_feature (1078)..(1078): n is a, c, g, or t
  misc_feature (1093)..(1093): n is a, c, g, or t
  misc_feature (1101)..(1101): n is a, c, g, or t
  misc_feature (1111)..(1111): n is a, c, g, or t
  misc_feature (1119)..(1119): n is a, c, g, or t
  misc_feature (1122)..(1122): n is a, c, g, or t
  misc_feature (1127)..(1127): n is a, c, g, or t
  misc_feature (1146)..(1146): n is a, c, g, or t
  misc_feature (1168)..(1168): n is a, c, g, or t
  misc_feature (1180)..(1180): n is a, c, g, or t
  misc_feature (1188)..(1188): n is a, c, g, or t
  misc_feature (1190)..(1190): n is a, c, g, or t
  misc_feature (1192)..(1192): n is a, c, g, or t
  misc_feature (1198)..(1198): n is a, c, g, or t
  misc_feature (1214)..(1215): n is a, c, g, or t
  misc_feature (1222)..(1223): n is a, c, g, or t
tagagaaattactatgagaggatcgcatcaccatcaccatcacggatcctatttaggtgacactatagaatcgtcgacccacgcgtccggcttgtcctcctctcccagtcggcaccacagcggtggctgccgggcgtggtgtcggtgggtcggttggtttttgtctcaccgttggtgtccgtgccgttcagttgcccgccatggctgagctggatccgttcggcgcccctgccggcgcccctggcggtcccgcgctggggaacggagtggccggcgccggcgaanaagacccggctgcggccttcttggcgcagcaagagagcgagattgcgggcatcgagaacgacgaggccttcgccatcctggacggcggcgcccccgggccccagccgcacggcgagccgccggggggtccggatgctgttgatggagtaatgaatggtgaatactaccaggaaagtaatggtccaacagacagttatgcagctatttcacaagtggatcgattgcagtcagagcctgaaagtatccgtaaatggagagaagaacaaatggaacgcttggaagcccttgatgccaattctcggaagcaagaagcagagtggaaagaaaaggcaataaaggagctagaagaatggtatgcaagacaggacgagcagctacagaaaacaaaagcaaacaacagggtggcagatgaagctttctacaaacaacccttcgctgacgtgattggttatgtggcagcagaagaagcctttgtaaatgacattgacgagtcgtcccccaggcactgagtgggaacgggtggcccggctgtgtgactttaaccccaagtctancaagcaagnccaanaatgtctcccgcatgcgctcantcctcatctccctcaagcangccccgctggtgcactgaanaaccaccctgtggaaaacactacatctgcaaaatcttaatcctactcantgaagctctttcacaagtcattggantaantatgtttgaagttntttttggaacaaaaacttttttgncctttaaaanttgtttcaattggtttggnaaattncatgntttccntcccttcaactgggnttcccccntggcattcanaaaagganggnaaagnagaaaaaagaaaggggaanggaaactttcccaaaaaaaaanccccaacccggngcttctgngnantaattncgaaaaaaaaatttcnnttcaaanntgt

SEQ ID NO: 292 - DNA, 634 bp, Homo Sapiens
  misc_feature (1)..(1): n is a, c, g, or t
  misc_feature (3)..(3): n is a, c, g, or t
nancaaagaaataactatgagaggatcgcatcaccatcaccatcacggatcctatttaggtgacactatagaatcgtcgacccacgcgtccgggcgccgcgcggtgaggttgtctagtccacgctcggagccatgccgtccaagggcccgctgcagtctgtgcaggtcttcggacgcaagaagacagcgacagctgtggcgcactgcaaacgcggcaatggtctcatcaaggtgaacgggcggcccctggagatgattgagccgcgcacgctacagtacaagctgctggagccagttctgcttctcggcaaggagcgatttgctggtgtagacatccgtgtccgtgtaaagggtggtggtcacgtggcccagatttatgctatccgtcagtccatctccaaagccctggtggcctattaccagaaatatgtggatgaggcttccaagaaggagatcaaagacatcctcatccagtatgaccggaccctgctggtagctgaccctcgtcgctgcgagtccaaaaagtttggaggtcctggtgcccgcgctcgctaccagaaatcctaccgataagcccatcgtgactcaaaactcacttgtataataaacagtttttgagggattttaaagtttc

SEQ ID NO: 293 - DNA, 1124 bp, Homo Sapiens
  misc_feature (69)..(69): n is a, c, g, or t
  misc_feature (847)..(847): n is a, c, g, or t
  misc_feature (898)..(898): n is a, c, g, or t
  misc_feature (903)..(903): n is a, c, g, or t
  misc_feature (910)..(910): n is a, c, g, or t
  misc_feature (934)..(934): n is a, c, g, or t
  misc_feature (939)..(939): n is a, c, g, or t
  misc_feature (945)..(945): n is a, c, g, or t
  misc_feature (955)..(955): n is a, c, g, or t
  misc_feature (968)..(968): n is a, c, g, or t
  misc_feature (973)..(973): n is a, c, g, or t
  misc_feature (979)..(979): n is a, c, g, or t
  misc_feature (989)..(989): n is a, c, g, or t
  misc_feature (999)..(999): n is a, c, g, or t
  misc_feature (1004)..(1004): n is a, c, g, or t
  misc_feature (1006)..(1006): n is a, c, g, or t
  misc_feature (1019)..(1020): n is a, c, g, or t
  misc_feature (1023)..(1023): n is a, c, g, or t
  misc_feature (1026)..(1026): n is a, c, g, or t
  misc_feature (1028)..(1028): n is a, c, g, or t
  misc_feature (1030)..(1030): n is a, c, g, or t
  misc_feature (1051)..(1051): n is a, c, g, or t
  misc_feature (1059)..(1059): n is a, c, g, or t
  misc_feature (1065)..(1065): n is a, c, g, or t
  misc_feature (1068)..(1069): n is a, c, g, or t
  misc_feature (1071)..(1071): n is a, c, g, or t
  misc_feature (1073)..(1074): n is a, c, g, or t
  misc_feature (1076)..(1076): n is a, c, g, or t
  misc_feature (1084)..(1084): n is a, c, g, or t
  misc_feature (1090)..(1090): n is a, c, g, or t
  misc_feature (1099)..(1099): n is a, c, g, or t
  misc_feature (1101)..(1101): n is a, c, g, or t
  misc_feature (1105)..(1105): n is a, c, g, or t
  misc_feature (1119)..(1119): n is a, c, g, or t
ttagagaaattactatgagaggatcgcatcaccatcaccatcacggatcctatttaggtgacactatantaatcgtcgacccacgcgtccggcccgagcggagcgccgcacgttcccaaccgcgaggccagacatctgactgttggtgtgagaccagtgctcctggtggtgtgccctgagccatggaggcgcctttgcagacagagatggtggagctggtgcccaatggcaaacactcagaggggctgctcccggtcatcacccccatggcaggcaaccagagggtcgaggaccctgcacggagctgtatggagggcaagagcttcctacagaaaagtcccagcaaggagccacacttcactgacttcgaggggaagacatcattcgggatgtcagtgttcaacctcagcaatgccatcatgggcagcggcatcctgggactcgcctatgccatggccaatacgggcattatccttttcctgttcctgttgacagctgtcgccttgctctccagctactccatccacctgctactcaagtcctcaggggtcgtgggcatccgtgcctatgagcagctgggctaccgtgcctttgggaccccaggaaagctggcagcagccctggccatcacgctccagaacatcggagccatgtccagctacctgtacatcatcaagtctgagctgccacttgtcatacagaccttcctgaacctggaggagaaaacctcggactggtacatgaacgggaactacctggtaatccttgtctctgtcaccatcattctgcccctggcactgatgcggcagcttggctacctgggctactccagcggcttctctcttanctgcatggtgttcttcctaattgcagtcatctacaaaaaagttccacgtgncctgnccactgncccccaacttcaaaaacaccacanggaantttcancccacgtggnaaatcgtgaaagnaaaangtgcanctgcaggtcnagcctgaggnttcancnttttgcatcccanntanttnangntcaattcaaaaaagcataacnatcccatnatggcnttnncntnntntgcacccnaggggngcccatttnantgantcaaggaccccccnaaaaa

SEQ ID NO: 294 - DNA, 913 bp, Homo Sapiens
catcaccatcaccatcacggatcctatttaggtgacactatagaatcgtcgacccacgcgtccgccctccagcccagcctcgctagctccgcctgcggtacgtgctcccgcctccgactcaaaatgcctgtctggggaggtggaaacaagtgtggggcctgtgggaggaccgtgtaccacgcagaagaggtgcagtgtgatggcaggagcttccaccgctgctgctttctctgcatggtttgcaggaaaaatttagatagcacaacagtggcaattcacgatgaagagatctactgcaaatcctgctacggaaagaagtatgggccaaaaggctacggttatggccagggcgctggcacgcttaacatggaccgtggcgagaggctgggcatcaaaccagagagtgttcagcctcacaggcctacaacaaatccaaacacttctaaatttgctcagaaatatggaggtgctgagaagtgttccagatgtggggattctgtatatgctgccgagaagataattggagctggaaagccctggcacaaaaactgtttccgatgtgcaaagtgtgggaagagtcttgaatcaacaactctgactgaaaaagaaggtgaaatctattgtaaaggatgctatgcaaagaactttgggcccaagggatttggctatggccaaggagcaggggctcttgttcatgcccagtaagatgtaaaccctgaactaaacatcacacactgagaatctcttcataatctaggcacagataatctttaacactaaactactgtgaaattctaccagcattaagtactgtatatcgccctgtacttggataggctggctaactcgtaggaagagagcactgtatggtatccttttgctttattcaccagcattttgggggaacatttct

SEQ ID NO: 295 - DNA, 975 bp, Homo Sapiens
  misc_feature (1)..(2): n is a, c, g, or t
  misc_feature (42)..(42): n is a, c, g, or t
  misc_feature (730)..(730): n is a, c, g, or t
  misc_feature (765)..(765): n is a, c, g, or t
  misc_feature (858)..(858): n is a, c, g, or t
  misc_feature (876)..(876): n is a, c, g, or t
  misc_feature (883)..(883): n is a, c, g, or t
  misc_feature (888)..(888): n is a, c, g, or t
  misc_feature (904)..(904): n is a, c, g, or t
  misc_feature (924)..(924): n is a, c, g, or t
  misc_feature (929)..(929): n is a, c, g, or t
  misc_feature (945)..(945): n is a, c, g, or t
  misc_feature (948)..(948): n is a, c, g, or t
  misc_feature (951)..(951): n is a, c, g, or t
  misc_feature (954)..(955): n is a, c, g, or t
  misc_feature (961)..(961): n is a, c, g, or t
  misc_feature (965)..(965): n is a, c, g, or t
  misc_feature (967)..(967): n is a, c, g, or t
  misc_feature (972)..(972): n is a, c, g, or t
nnttagagagaattactatggagaggatcgcatcaccatcancatcacggatcctatttaggtgacactatagaatcgtcgacccacgcgtccgagcacccattcccgtgccctacgtcctaccgcacggccctcacctactacctggacatcaccaacccgccgcgtaccaacgtgctgtacgagctggcgcagtacgcctcggagccctcggagcaggagctgctgcgcaagatggcctcctcctccggcgagggcaaggagctgtacctgagctgggtggtggaggcccggaggcacatcctggccatcctgcaggactgcccgtccctgcggccccccatcgaccacctgtgtgagctgctgccgcgcctgcaggcccgctactactccatcgcctcatcctccaaggtccaccccaactctgtgcacatctgtgcggtggttgtggagtacgagaccaaggccggccgcatcaacaagggcgtggccaccaactggctgcgggccaaggagcctgccggggagaacggcggccgtgcgctggtgcccatgttcgtgcgcaagtcccagttccgcctgcccttcaaggccaccacgcctgtcatcatggtgggccccggcaccggggtggcacccttcataggcttcatccaggagcgggcctggctgcgacagcagggcaaggaggtgggggagacgctgctgtactacggctgccgccgctcanatgaggactacctgtaccgggaggagctggcgcanttccacagggacggtgcgctcacccagctcaacgtggccttctcccgggagcagtcccacaaggtctacgtccagcacctgctaaagcaagancgaaagcacctgtggaanttgatcnaaggnggtgcccacatctacntctgtggggatgcacggaanatggncagggatgtgcaaaanacnttntannaaatcntggntnaactnggg

SEQ ID NO: 296 - DNA, 859 bp, Homo Sapiens
  misc_feature (2)..(2): n is a, c, g, or t
  misc_feature (19)..(19): n is a, c, g, or t
  misc_feature (602)..(602): n is a, c, g, or t
  misc_feature (740)..(740): n is a, c, g, or t
  misc_feature (784)..(784): n is a, c, g, or t
  misc_feature (851)..(851): n is a, c, g, or t
  misc_feature (853)..(853): n is a, c, g, or t
  misc_feature (859)..(859): n is a, c, g, or t
gncgtgtgtaggagaattnactatgagaggatcgcatcaccatcaccatcacggatcctatttaggtgacactatagaatcgtcgacccacgcgtccgcttcttcctccgaccctaaatcgaagttctttgagctaatccagggcactgagattgacatcttcagctacaagcccacactgctcacctctaaaaccctggagaagatccgccctgtgtttgactaccgctgcatggtatctggcagtgagcagaagttcctcatcggcctggggaaatcccagatctacacatgggatggccgccagtcagaccgctggatcaagctagacctgaagacagagctgccccgggacactctgctatctgtggaaattgtgcatgagctgaaaggggaggggaaggcccagaggaagatcagtgccatccacatcctcgatgtccttgtgctgaatggcaccgacgttcgggagcagcactttaaccagcgaattcagcttgccgagaaatttgtgaaagccgtttccaagcctagtcggcccgacatgaatcccatcagggtgaaggaggtgtacagactggaagagatggagaagatttttngtcaggttggagatgaagatcatcaaggggctccagtggcacccccaaagctcagctacacaggggcgtgatgaccggcactttgtacccatgggcctctacatcgtcaggacagtgaatgagccctggactatgggnatcagcaaaagcttcaagaagaagttcttctacaacaagaaaancaaggactctactttttgacctcccctggagactccattggccccattttcacattttgctactatngnccgggn

SEQ ID NO: 297 - DNA, 1378 bp, Homo Sapiens
  misc_feature (722)..(722): n is a, c, g, or t
  misc_feature (843)..(843): n is a, c, g, or t
  misc_feature (875)..(875): n is a, c, g, or t
  misc_feature (1351)..(1352): n is a, c, g, or t
  misc_feature (1357)..(1362): n is a, c, g, or t
gacccacccctgagaaatactagagaggacgcatcccatcaccatcacggtcgacccacgcgtccgcggacgcgtgggctggcagtggtggcggctcttcaccaaggtcaagccgctgctgcaggtgagccggcaggaggaggagatgatggccaaggaggaggagctggtgaaggtcagagagaagcagctggctgcggagaacaggctcacggagatggagacgctgcagtctcagctcatggcagagaaattgcagctgcaggagcagctccaggcagaaaccgagctgtgtgccgaggctgaggagctccgggcccgcctgaccgccaagaagcaggaattagaagagatctgccatgacctagaggccagggtggaggaggaggaggagcgctgccagcacctgcaggcggagaagaagaagatgcagcagaacatccaggagcttgaggagcagctggaggaggaggagagcgcccggcagaagctgcagctggagaaggtgaccaccgaggcgaagctgaaaaagctggaggaggagcagatcatcctggaggaccagaactgcaagctggccaaggaaaagaaactgctggaagacagaatagctgagttcaccaccaacctcacagaagaggaggagaaatctaagagcctcgccaagctcaagaacaagcatgaggcaatgatcactgacttggaagagcgcctccgcaggnaggagaagcagcgacaggagctgggagagacccgccggaagctgggagggagactccacagacctcagcgaccagatcgccgagctcaggcccagatcgcggaggctcagatgcagctggncagaaagaaagaggagctccaggccgcctggncaaagtggaaaaggaagctgcccagaagacatggcctcaagagatccgggagctggatctcagtctctgactccaggagacctggagtctgagcggctccagaataaagctgagaacagaacggaccctggggaaaactaagggctgaaaccgattgaggaccctggatcccactgccaccggactccggcaacgggacagaggggactccgaaaaaaccgccggggaggccaacccccagccccctccggatgggggaccccccgcccggggagtggggaacttggcaccaacggtgaaaacctcaagcaaacctccaaacacgggactcccccggaaagtctcggcaggaccccacccccaaggggctccctgcgttttactaaacgcccacgcacgccccgggggaaccgctccccaccaccaatccatccctctgtggagaaacacaaccaccaccccaccccccaaccaanncccannnnnnatacacgacaccgtga

SEQ ID NO: 298 - DNA, 1220 bp, Homo Sapiens
  misc_feature (1)..(1): n is a, c, g, or t
  misc_feature (846)..(846): n is a, c, g, or t
  misc_feature (944)..(944): n is a, c, g, or t
  misc_feature (948)..(948): n is a, c, g, or t
  misc_feature (964)..(964): n is a, c, g, or t
  misc_feature (967)..(967): n is a, c, g, or t
  misc_feature (994)..(994): n is a, c, g, or t
  misc_feature (1037)..(1037): n is a, c, g, or t
  misc_feature (1047)..(1047): n is a, c, g, or t
  misc_feature (1072)..(1072): n is a, c, g, or t
  misc_feature (1081)..(1081): n is a, c, g, or t
  misc_feature (1089)..(1089): n is a, c, g, or t
  misc_feature (1102)..(1102): n is a, c, g, or t
  misc_feature (1110)..(1110): n is a, c, g, or t
  misc_feature (1119)..(1119): n is a, c, g, or t
  misc_feature (1132)..(1132): n is a, c, g, or t
  misc_feature (1136)..(1136): n is a, c, g, or t
  misc_feature (1143)..(1143): n is a, c, g, or t
  misc_feature (1147)..(1147): n is a, c, g, or t
  misc_feature (1150)..(1150): n is a, c, g, or t
  misc_feature (1157)..(1157): n is a, c, g, or t
  misc_feature (1161)..(1161): n is a, c, g, or t
  misc_feature (1165)..(1165): n is a, c, g, or t
  misc_feature (1167)..(1167): n is a, c, g, or t
  misc_feature (1171)..(1171): n is a, c, g, or t
  misc_feature (1179)..(1179): n is a, c, g, or t
  misc_feature (1181)..(1181): n is a, c, g, or t
  misc_feature (1183)..(1183): n is a, c, g, or t
  misc_feature (1186)..(1186): n is a, c, g, or t
  misc_feature (1189)..(1189): n is a, c, g, or t
  misc_feature (1195)..(1195): n is a, c, g, or t
  misc_feature (1203)..(1203): n is a, c, g, or t
  misc_feature (1212)..(1212): n is a, c, g, or t
naatagagaaattactatgagaggatcgcatcaccatcaccatcacggatcctatttaggtgacactatagaatcgtcgacccacgcgtccggccatcttggctcctgtggaggcctgctgggaacgggacttctaaaaggaactatgtctggaaggctgtggtccaaggccatttttgctggctataagcggggtctccggaaccaaagggagcacacagctcttcttaaaattgaaggtgtttacgcccgagatgaaacagaattctatttgggcaagagatgcgcttatgtatataaagcaaagaacaacacagtcactcctggcggcaaaccaaacaaaaccagagtcatctggggaaaagtaactcgggcccatggaaacagtggcatggttcgtgccaaattccgaagcaatcttcctgctaaggccattggacacagaatccgagtgatgctgtacccctcaaggatttaaactaacgaaaaatcaataaataaatgtggatttgtgctcttgtatttttaagtggattaaaaaacttactaccttaaattgatttgctacatgcttaaaatgatagaggttgctcagcatttttggagtacaagggggtcagagagacatgtgatgaaaattacagggcgagtacagagatttagaagggaacgggttttaatgcgagtatctttgacagagtcttgctctgttgcccatgctggagtgtagtggtgctcgctgcagcctcacattcaaaggctcaagcaatcctcccttggcctttgaagtagctgggaccacaggctcatgccaccatccctgggtcatttttaaattttttgtanagagggtctgactcttgcctatgctggcttcaactcctgggctcaagcaatcctccttccttggcctctcctgaagtgctggaaacagttatgagccncccncctgccaagtgcttgnganactatgcatttgttcatgcaaatgggnaacttaaatttgaatggaaatttgttgatgggctttggcagtncattggaaanactgggatgaaaactcttgggactnggactgganaaaccttnccgtaattaaaanaaattaanccatttacncccctcaaaaaancaanccttggnaggnacntgggagntggnaaangnccgnaaaggggncncnttnttnggctcnggttttanccgggaaantcaaaatg

SEQ ID NO: 299 - DNA, 538 bp, Homo Sapiens
  misc_feature (1)..(1): n is a, c, g, or t
  misc_feature (4)..(4): n is a, c, g, or t
naantagagaaattactatgagaggatcgcatcaccatcaccatcacggatcctatttaggtgacactatagaatcgtcgacccacgcgtccggattaagtgtggctgatcttattgaatccatgttgaaaaatctatccaggattcatcccgtgtcaacaatggtaaaggggatgtatggcattgagaatgaagtcttcctgagccttccatgtatcctcaatgcccggggattaaccagcgttatcaaccagaagctaaaggatgatgaggttgctcagctcaagaaaagtgcagataccctgtgggacatccagaaggacctaaaagacctgtgactagtgagctctaggctgtagaaatttaaaaactacaatgtgattaactcgagcctttagttttcatccatgtacatggatcacagtttgctttgatcttcttcaatatgtgaatttgggctcacagaatcaaagcctatgcttggtttaatgcttgcaatctgagctcttgaacaaataaaattaactattgtagtgtg

SEQ ID NO: 300 - DNA, 947 bp, Homo Sapiens
  misc_feature (916)..(916): n is a, c, g, or t
  misc_feature (924)..(924): n is a, c, g, or t
  misc_feature (926)..(947): n is a, c, g, or t
agagaaattactatgagaggatcgcatcaccatcaccatcacggatcctatttaggtgacactatagaatcgtcgacccacgcgtccgcccacgcgtccggtcagaaccgccgtcgctcgctcccttctcggcagtggtacctgttcccggtgtccctgaggacgtgcgggccaggtacggccccgaaagtaggaagcggagggggagcaggtttgcggggccaagtgttgcggcgacgcacctcacgtcgagaatcgggaggaggagactgcaaggataggcccaggagtaatggagtccaaagaggaacgagcgttaaacaatctcatcgtggaaaatgtcaaccaggaaaatgatgaaaaagatgaaaaggagcaagttgctaataaaggggagcccttggccctacctttgaatgttagtgaatactgtgtgcctagaggaaaccgtaggcggttccgcgttaggcagcccatcctgcagtatagatgggacataatgcataggcttggagagccacaggcaaggatgagagaggagaatatggaaaggattggggaggaggtgagacagctgatggaaaagctgagggaaaagcagttgagtcatagtctgcgggcagtcagcactgatccccctcaccatgaccatcacgatgagttttgccttatgccctgaatcctgatggtttccctgaagttaatagggagacccctgcttcctaaacttacacatttgtggtgtacctttgtcgtaaacgttttgatgttacctatttcttgtgggtctcctattaccagcttctaaatgaatgttgtttttgacccagtttgtaagtttctgtcagcaggagagttttacctattgcatggaaagatgctcattatatattgtgaagttaataaaacagttttnaaaagccnannnnnnnnnnnnnnnnnnnnnn

SEQ ID NO: 301 - DNA, 905 bp, Homo Sapiens
atagagaaattactatgagaggatcgcatcaccatcaccatcacggatcctatttaggtgacactatagaatcgtcgacccacgcgtccggccatcatcttcgtggtggccagcagcagctacaacatggtcatccgggaggacaaccagaccaaccgcctgcaggaggctctgaacctcttcaagagcatctggaacaacagatggctgcgcaccatctctgtgatcctgttcctcaacaagcaagatctgctcgctgagaaagtccttgctgggaaatcgaagattgaggactactttccagaatttgctcgctacactactcctgaggatgctactcccgagcccggagaggacccacgcgtgacccgggccaagtacttcattcgagatgagtttctgaggatcagcactgccagtggagatgggcgtcactactgctaccctcatttcacctgcgctgtggacactgagaacatccgccgtgtgttcaacgactgccgtgacatcattcagcgcatgcaccttcgtcagtacgagctgctctaagaagggaacccccaaatttaattaaagccttaagcacaattaattaaaagtgaaacgtaattgtacaagcagttaatcacccaccatagggcatgattaacaaagcaacctttcccttcccccgagtgattttgcgaaacccccttttcccttcagcttgcttagatgttccaaatttagaaagcttaaggcggcctacagaaaaaggaaaaaaggccacaaaagttccctctcactttcagtaaaaataaataaaacagcagcagcaaacaaataaaatgaaataaaagaaacaaatgaaataatattgtgttgtgcagcattaaaaaaaatcaaaataaaaattaaatgtgagc

SEQ ID NO: 302 - DNA, 1179 bp, Homo Sapiens
  misc_feature (821)..(821): n is a, c, g, or t
  misc_feature (831)..(831): n is a, c, g, or t
  misc_feature (897)..(897): n is a, c, g, or t
  misc_feature (921)..(921): n is a, c, g, or t
  misc_feature (948)..(948): n is a, c, g, or t
  misc_feature (979)..(979): n is a, c, g, or t
  misc_feature (981)..(981): n is a, c, g, or t
  misc_feature (991)..(991): n is a, c, g, or t
  misc_feature (996)..(996): n is a, c, g, or t
  misc_feature (1002)..(1002): n is a, c, g, or t
  misc_feature (1005)..(1005): n is a, c, g, or t
  misc_feature (1033)..(1033): n is a, c, g, or t
  misc_feature (1035)..(1035): n is a, c, g, or t
  misc_feature (1037)..(1037): n is a, c, g, or t
  misc_feature (1040)..(1040): n is a, c, g, or t
  misc_feature (1045)..(1045): n is a, c, g, or t
  misc_feature (1048)..(1048): n is a, c, g, or t
  misc_feature (1053)..(1054): n is a, c, g, or t
  misc_feature (1056)..(1057): n is a, c, g, or t
  misc_feature (1059)..(1059): n is a, c, g, or t
  misc_feature (1068)..(1068): n is a, c, g, or t
  misc_feature (1081)..(1081): n is a, c, g, or t
  misc_feature (1086)..(1086): n is a, c, g, or t
  misc_feature (1090)..(1090): n is a, c, g, or t
  misc_feature (1106)..(1107): n is a, c, g, or t
  misc_feature (1116)..(1116): n is a, c, g, or t
  misc_feature (1118)..(1118): n is a, c, g, or t
  misc_feature (1137)..(1137): n is a, c, g, or t
  misc_feature (1139)..(1139): n is a, c, g, or t
  misc_feature (1141)..(1141): n is a, c, g, or t
  misc_feature (1145)..(1145): n is a, c, g, or t
  misc_feature (1160)..(1160): n is a, c, g, or t
  misc_feature (1163)..(1163): n is a, c, g, or t
  misc_feature (1165)..(1165): n is a, c, g, or t
atagagaaattactatgagaggatcgcatcaccattcaccatcacggatcctatttaggtgacactatagaatcgtcgacccacgcgtccgcccacgcgtccggtgtgctggacctgtctgtcaagtccagcctttcaggagttgaaaatctgaacagctcttatttctcttcacaggacgtgctgagaagcaacctggtgcaggtgaaggtggagaaagaggcttcctgtgatgagagtgatgttggcactaatgactatgacatggaacatagcactgtgaaagaaagtgtgagcactaataacagggtacagtatgagccggcccatctggctcccctgagggaggactcggtcttgagggagctggaccgggaggacaaagccagtgatgatgagatgatgaccccagagagcgagcgtgtccaggtggagggaggcatggagagcagtctgctcccctacgtctccaacatcctgagccccgcgggccagatcttcatgtgccccctgtgcaacaaggtcttccccagcccccacatcctgcagatccacctgagcacgcacttccgcgagcaggacggcatccgcagcaagcccgccgccgatgtcaacgtgcccacgtgctcgctgtgtgggaagactttctcttgcatgtacaccctcaagcgccacgagaggactcactcgggggagaagccctacacatgcacccagtgcggcaagagcttccagtactcgcacaacctgagccgccatgccgtggtgcacacccgcgagaagccgcacgcctgcaagtggtgcgagcgcaggttcacgcnagtccggggnacctgtacagacacattcgcaagttccactgtgagttggtgaactccttgtcggtcaaaagcgaancactgagcttgcctactgtcaaanactggaaccttaaaaaaaaacttctcnaaaacttttggaaaatatttttatttttttntnaattaatatnttatntttttnccntattttttaaatagattttttatataantngnggnacggnctnaaaannanntntttttttcntggaaaaaaaaantgggnaaanttaacttgtttttgcnntttaaaaancntggaaatctccctaatttnancnttcngaaaaaaaaaccttnaancnagtcaaaaaaaaaa

SEQ ID NO: 303 - DNA, 1111 bp, Homo Sapiens
  misc_feature (624)..(624): n is a, c, g, or t
  misc_feature (838)..(838): n is a, c, g, or t
  misc_feature (855)..(855): n is a, c, g, or t
  misc_feature (906)..(906): n is a, c, g, or t
  misc_feature (912)..(912): n is a, c, g, or t
  misc_feature (947)..(947): n is a, c, g, or t
  misc_feature (963)..(963): n is a, c, g, or t
  misc_feature (969)..(969): n is a, c, g, or t
  misc_feature (972)..(972): n is a, c, g, or t
  misc_feature (988)..(988): n is a, c, g, or t
  misc_feature (995)..(995): n is a, c, g, or t
  misc_feature (1037)..(1037): n is a, c, g, or t
  misc_feature (1040)..(1040): n is a, c, g, or t
  misc_feature (1042)..(1042): n is a, c, g, or t
  misc_feature (1047)..(1047): n is a, c, g, or t
  misc_feature (1049)..(1049): n is a, c, g, or t
  misc_feature (1053)..(1053): n is a, c, g, or t
  misc_feature (1056)..(1056): n is a, c, g, or t
  misc_feature (1058)..(1058): n is a, c, g, or t
  misc_feature (1073)..(1073): n is a, c, g, or t
  misc_feature (1078)..(1078): n is a, c, g, or t
  misc_feature (1082)..(1082): n is a, c, g, or t
  misc_feature (1084)..(1084): n is a, c, g, or t
  misc_feature (1091)..(1091): n is a, c, g, or t
  misc_feature (1101)..(1101): n is a, c, g, or t
  misc_feature (1105)..(1105): n is a, c, g, or t
  misc_feature (1108)..(1109): n is a, c, g, or t
aatagagagattactatgagaggatcgcatcaccatcaccatcacggatcctatttaggtgacactatagaatcgtcgacccacgcgtccggcgggaccgagcaggaatccgtatctgggaacagaatgaacggagaccagaattcagatgtttatgcccaagaaaagcaggatttcgttcagcacttctcccagatcgttagggtgctgactgaggatgagatggggcacccagagataggagatgctattgcccggctcaaggaggtcctggagtacaatgccattggaggcaagtataaccggggtttgacggtggtagtagcattccgggagctggtggagccaaggaaacaggatgctgatagtctccagcgggcctggactgtgggctggtgtgtggaactgctgcaagctttcttcctggtggcagatgacatcatggattcatcccttacccgccggggacagatctgctggtatcagaagccgggcgtgggtttggatgccatcaatgatgctaacctcctggaagcatgtatctaccgcctgctgaagctctattgccgggagcagccctattacctgaacctgatcgagctcttcctgcagagttcctatcanactgagattgggcagaccctggacctcctcacagccccccagggcaatgtggatcttgtcagattcactgaaaagaggtacaaatctattgtcaagtacaagacagctttctactccttctaccttcctatagctgcagccatgtacatggcaggaattgatggcgagaaggagcacgccaatgccaagaagatcctgctggagatgggggganttctttcagattcaggnatgattaccttgacctctttggggaccccagtgtgaccggcaaaattggcnctgacntccagaacaacaaatgcaactggctggggtttcantgtctgcaacggcccnctccanaanagtaccgatcctgaangaaaatnacgggcaaaaggaggctgaaaaaagtggcccgggtgaaggcnctntntaagnanctgnatntncccacaatgttcttngcaantgangnaaaacgnttccgccccntttntgnntc

SEQ ID NO: 304 - DNA, 956 bp, Homo Sapiens
ctatgagaggatcgcatcaccatcaccatcacggatcctatttaggtgacactatagaatcgtcgacccacgcgtccggggtgcgggtcgctatggcggtggacatcacgctgctattccgggccagcgtcaagaccgtgaagacgcggaacaaggcgctgggagtggcggtgggcggcggggtcgatggcagccgggacgagctgttccgccggagcccccggcccaagggcgacttctccagccgggcccgcgaagtgatttctcacattggcaaactgagagattttcttctggaacacaggaaagattatattaatgcttatagccataccatgtctgaatatgggaggatgacagacacagaacgagaccagatagaccaggatgcccagatattcatgaggacctgttcagaagcaattcagcaactacgaacagaagctcacaaggagatacattcccagcaagtgaaggagcacaggaccgctgttttggatttcattgaagattacttgaaaagagtatgtaaactttactcagaacagagagccatccgagttaaaagagtggtggataagaaaagattatctaagctggaaccagaaccaaatacaaagacaagagaatccacatcttctgagaaagtttcacagagtccttcaaaagactctgaagaaaaccctgccactgaagaacgtccagaaaaaattttggctgaaacacaacctgaattgggaacgtggggagatggcaaaggcgaagatgagttatccccagaagaaatacaaatgtttgaacaggaaaatcagcgactaattggtgaaatgaacagcttgtttgatgaagtgaggcaaatcgaagggagagtggttgagatttccagactccaagagatattcacggaaaaggttttgcaacaggaagctgagattgacagcattcaccagttagtt

SEQ ID NO: 305 - DNA, 838 bp, Homo Sapiens
  misc_feature (2)..(2): n is a, c, g, or t
  misc_feature (747)..(747): n is a, c, g, or t
  misc_feature (783)..(783): n is a, c, g, or t
  misc_feature (785)..(785): n is a, c, g, or t
  misc_feature (817)..(817): n is a, c, g, or t
  misc_feature (824)..(824): n is a, c, g, or t
tnagaggagaattaactatgagaggatcgcatcaccatcaccatcacggatcctatttaggtgacactatagaatcgtcgacccacgcgtccgcccacgcgtccgcggcggcggtggcggcggcgactgctgcggtgaaggaggaggaggagccgagcgggcgctggcaccgaggcctgaccatggacgaggaatacgatgtgatcgtgctggggaccggtctcaccgaatgcatcctgtcgggcatcatgtctgtgaacgggaagaaggtgctgcacatggaccggaacccctactacgggggcgagagctcctccatcacacccctggaggagctgtataagcgttttcagttgctggaggggccccctgagtcgatgggccgaggccgagactggaatgttgacctgattcccaaattcctcatggctaacgggcagctggtaaagatgctactgtatacagaggtgactcgctacctggacttcaaggtggtggagggcagctttgtctacaaggggggcaagatctacaaagtgccgtccactgagactgaggccttggcttccaatctgatgggcatgtttgagaaacggcgcttccgcaagttcctggtgtttgtggcaaacttcgatgagaatgaccccaagacctttgagggcgttgaccccccagactaccagcatgcgtgacgttctaccggaagtttgatctgggccaggatgtcatcgatttcactggccatgnccctggggctctaccgcactgatgactacctggacnanccttgccttgagaccgtcaaccgcatcaagtngtacagngagtcccctggccc

SEQ ID NO: 306 - DNA, 876 bp, Homo Sapiens
  misc_feature (1)..(1): n is a, c, g, or t
  misc_feature (364)..(365): n is a, c, g, or t
  misc_feature (422)..(422): n is a, c, g, or t
  misc_feature (502)..(502): n is a, c, g, or t
  misc_feature (564)..(564): n is a, c, g, or t
  misc_feature (587)..(587): n is a, c, g, or t
  misc_feature (618)..(618): n is a, c, g, or t
  misc_feature (627)..(627): n is a, c, g, or t
  misc_feature (639)..(639): n is a, c, g, or t
  misc_feature (666)..(666): n is a, c, g, or t
  misc_feature (695)..(695): n is a, c, g, or t
  misc_feature (718)..(718): n is a, c, g, or t
  misc_feature (730)..(730): n is a, c, g, or t
  misc_feature (743)..(743): n is a, c, g, or t
  misc_feature (745)..(745): n is a, c, g, or t
  misc_feature (752)..(752): n is a, c, g, or t
  misc_feature (768)..(768): n is a, c, g, or t
  misc_feature (775)..(775): n is a, c, g, or t
  misc_feature (788)..(788): n is a, c, g, or t
  misc_feature (792)..(792): n is a, c, g, or t
  misc_feature (795)..(795): n is a, c, g, or t
  misc_feature (797)..(797): n is a, c, g, or t
  misc_feature (799)..(799): n is a, c, g, or t
  misc_feature (803)..(803): n is a, c, g, or t
  misc_feature (805)..(805): n is a, c, g, or t
  misc_feature (810)..(811): n is a, c, g, or t
  misc_feature (816)..(817): n is a, c, g, or t
  misc_feature (824)..(824): n is a, c, g, or t
  misc_feature (828)..(828): n is a, c, g, or t
  misc_feature (838)..(838): n is a, c, g, or t
  misc_feature (841)..(841): n is a, c, g, or t
  misc_feature (844)..(844): n is a, c, g, or t
  misc_feature (852)..(852): n is a, c, g, or t
  misc_feature (861)..(861): n is a, c, g, or t
natttagagaaattactatgagaggatcgcatcaccatcaccatcacggatcctatttaggtgacactatagaatcgtcgacccacgcgtccggcctccgccttcggaggctgacgcgcccgggcgccgttccaggcctgtgcagggcggatcggcagccgcctggcggcgatccagggcggtgcggggcctgggcgggagccgggaggcgcggccggcatggaggcgctgctgctgggcgcggggttgctgctgggcgcttacgtgcttgtctactacaacctggtgaaggccccgccgtgcggcggcatgggcaacctgcggggccgcacggccgtggtcacgggcgccaacagcggcatcnnaaagatgacggcgctggagctggcgcgccggggagcgcgcgtggtgctggcctgccncagccaggagcgcggggaggcggctgccttcgacctccgccaggagagtgggaacaatgaggtcatcttcatggccttgnacttggccagtctggcctcggtgcgggcctttgccactgcctttctgagctctgagccacgnttggacatcctcatccacaatgncggtatcagttcctgtggccggacccgtgangcgtttaanctgctgcttcgngtgaaccatatcggtccctttctgctnacaaatctgctgctgccttgcctgaaagnatgtgcccctaaccacgtgatgntggtaacctcanctgcccactgtcngnaaacgtnttgaacttcaaacgcnctggacngcccaatgtttgngctngcntnangaantncgggnnatatnnttaacantaanctggctaatntanttntttgcccnggaacttcncccaacaacctttga

SEQ ID NO: 307 - DNA, 933 bp, Homo Sapiens
  misc_feature (849)..(849): n is a, c, g, or t
  misc_feature (908)..(908): n is a, c, g, or t
gagaaattactatgagaggatcgcatcaccatcaccatcacggatcctatttaggtgacactatagaatcgtcgacccacgcgtccgtccagcctctgatgaagcaggagagaaagaagccaagtctgattaataaccatataccatgtcttatcagtggtccctgtctcccttcttgtacaatccagaggaatatttttatcaactattttgtaaatgcaagttttttagtagctctagaaacatttttaagaaggagggaatcccacctcatcccattttttaagtgtaaatgcttttttttaagaggtgaaatcatttgctggttgtttattttttggtacaaccagaaaatagtgtgggatattgaattatgggaggctctgactgtctcgggtgtcagcttaacattccacagatggggggttagtttttatatcctataatacaaagcatattaaatggcaatatggagtcagtcctgcatttaatgtcttgaacattttaaattacttctattaccatgttgttttttagtagaattgtttcctaaagaaaaccactctttgatcatggctctctctgccagaattgtgtgcactctgtaacatctttggttgtggtagtcctgttttcctaataactttgttactgtgctgtgaaagattacagatttgaacatgtagtgtacgtgctattgagttgtgaactggtgggccgtatgtaacagctgaccaacgtgaagatactggtacttgatagcctcttaaggaaaatttgcttccaaattttaagctggaaagtcactggaataactttaaaaaagaattacaatacatggctttttanaatttcgttacgtatgttaagatttgtgtacaaattgaaatgtctgtactgatcctcanccaataaaatctcagttatgaaaat

SEQ ID NO: 308 - DNA, 605 bp, Homo Sapiens
catcaccatcaccatcacggatcctatttaggtgacactatagaatcgtcgacccacgcgtccgtgttgaatgaagaaaatccaagtaaggcctacaggtgcagttccaaggaagcctttgagaaagggctctgcttgagttgtagaaagaaccgctgcaacaatctgggctatgagatcaataaagtcagagccaaaagaagcagcaaaatgtacctgaagactcgttctcagatgccctacaaagtcttccattaccaagtaaagattcatttttctgggactgagagtgaaacccataccaatcaggcctttgagatttctctgtatggcaccgtggccgagagtgagaacatcccattcactctgcctgaagtttccacaaataagacctactccttcctaatttacacagaggtagatattggagaactactcatgttgaagctcaaatggaagagtgattcatactttagctggtcagactggtggagcagtcccggcttcgccattcagaagatcagagtaaaaagcaggagagactcagaaaaaaggtgatcttctgttctagggagaaagtgtctcatttgcagaaaggaaaaggc

SEQ ID NO: 309 - DNA, 896 bp, Homo Sapiens
ctatgagaggtcgcatcaccatcaccatcacggatcctatttaggtgacactatagaatcgtcgacccacgcgtccgctggcgacaaaatggctgcccgagggagacgggcggagcctcagggccgggaggctccgggccccgcgggcggtggcggtggcgggagccgttgggctgagtcgggatcggggacgtcgcccgagagcggggacgaggaggtgtcgggcgcgggttcgagcccggtgtcgggcggcgtgaacttgttcgccaacgacggcagcttcctggagctgttcaagcggaagatggaggaggagcagcggcagcggcaggaggagccgcccccgggtccgcagcgacccgaccagtcggccgccgccgctggccccggggatccgaagaggaagggcggtccgggctccacacttagcttcgtgggcaaacgcagaggcgggaacaaactagccctcaagacgggaatagtagccaagaagcagaagacggaggatgaggtattaacaagtaaaggtgacgcgtgggccaagtacatggcagaagtgaaaaagtacaaagctcaccagtgcggtgacgatgataaaactcggcccctggtgaaatgacgcccctcccccacctgcccatggcctgggactctctgcgatgtacataactatttaatgcagcggcagcggcgacagccttccctgagaggacttaaaaagcagaaggaaaccgagatgcttcccgcagccgtggacgattctccaggactctttttttaccttgagcacttgcctcgtgagacttcatagaacagtggtttactgtcccccccttctcacctcctcattctctctggctctttctgtcttcctcttctcaccctcctccctcccc

SEQ ID NO: 310 - DNA, 507 bp, Homo Sapiens
  misc_feature (4)..(4): n is a, c, g, or t
  misc_feature (333)..(333): n is a, c, g, or t
  misc_feature (346)..(346): n is a, c, g, or t
  misc_feature (351)..(351): n is a, c, g, or t
  misc_feature (383)..(383): n is a, c, g, or t
  misc_feature (385)..(385): n is a, c, g, or t
  misc_feature (409)..(409): n is a, c, g, or t
  misc_feature (415)..(415): n is a, c, g, or t
  misc_feature (431)..(433): n is a, c, g, or t
  misc_feature (444)..(444): n is a, c, g, or t
  misc_feature (451)..(451): n is a, c, g, or t
  misc_feature (453)..(454): n is a, c, g, or t
  misc_feature (465)..(469): n is a, c, g, or t
  misc_feature (472)..(473): n is a, c, g, or t
  misc_feature (485)..(485): n is a, c, g, or t
  misc_feature (487)..(487): n is a, c, g, or t
  misc_feature (490)..(490): n is a, c, g, or t
  misc_feature (492)..(492): n is a, c, g, or t
  misc_feature (498)..(498): n is a, c, g, or t
  misc_feature (502)..(502): n is a, c, g, or t
tgangaaggatcgcatcaccatcaccatcacggatcctatttaggtgacactatagaatcgtcgacccacgcgtccgcgctcttctgctgctgtttgtctacttcctcctgcttccccgccgccgccgccgccatcatgagggaaatcgtgcacttgcaggccgggcagtgcggcaaccaaatcggcgccaagttttgggaggtgatcagcgatgagcacggcatcgaccccacgggcacctaccacggggacagcgacctgcagctggaacgcatcaacgtgtactacaatgaggccaccggcggcaagtacgtgccccgcgccgggctcgnggatctggagccnggcancatgaactccgggcgctcggggcccttcgggnanatcttccgggccggaaaaatttcntttttnggaaaaaaaagggggnnngggaaaaaaanttggggncnnaaagggggggnnnnntanncaaaaaaaaaancnccncnaaaaanttgnggggg

SEQ ID NO: 311 - DNA, 950 bp, Homo Sapiens
actatgagaggtcgcatcaccatcaccatcacggatcctatttaggtgacactatagaatcgtcgacccacgcgtccgatggatgtcaatggagaaatcgagataaatatgctggacgagaagctgatcaagtttctggccttgcagagaatacatcagcttttcccctcccgggtccaaccttcaccgggcagtgtcgggacacatcagctggcttctggagggcaccacatagaagtgcaaagaaaggaggtacaggcccgagctgtgttctaccccctcttagggttgggaggagctgtgaacatgtgctatcgaaccctctacatcgggacaggagctgacatggatgtgtgccttacaaactatggtcactgtaactacgtgtccgggaaacatgcctgcatattctacgatgagaataccaaacattatgagctgttaaactacagtgagcatgggacaacggtggacaatgtgctgtattcatgtgacttctcggagaagaccccgccaacccccccaagcagtattgttgccaaagtgcagagtgtcatcaggcgccgccggcaccagaaacaggacgaagagccaagtgaggaggcagccatgatgagttcccaggcccaggggccgcagcggagaccctgcaattgcaaagccagcagctcgagcttgattgggggcagtggggccggctgggagggcacagccttactgcaccatggcagctacatcaagctgggctgcctgcagtttgtcttcagcatcactgagtttgcgaccaaacagcccaaaggcgatgccagcctgctgcaggatggggtcttggccgagaagctctctctcaagccccaccagggccctgtgctgcgctccaactctgttccttaggactggcggctaccccgccactggcctgtacacccacccaagactcctgcaatgca

SEQ ID NO: 312 - DNA, 940 bp, Homo Sapiens
tgagaggatcgcatcaccatcaccatcacggatcctatttaggtgacactatagaatcgtcgacccacgcgtccgggagatttcaagatgcggttcgactccgagggaggagctttgcgggcaacctgaacacctacaagcgacttgccatcaagctgccggatgatcagatcccaaagaccaattgcaacgtagctgtcatcaacgtgggggcacccgcggctgggatgaacgcagccgtacgctcagctgtgcgcgtgggcattgccgacggccacaggatgctcgccatctatgatggctttgacggcttcgccaagggccagatcaaagaaatcggctggacagatgtcgggggctggaccggccaaggaggctccattcttgggacaaaacgcgttctcccggggaagtacttggaagagatcgccacacagatgcgcacgcacagcatcaacgcgctgctgatcatcggtggattcgaggcctacctgggactcctggagctgtcagccgcccgggagaagcacgaggagttctgtgtccccatggtcatggttcccgctactgtgtccaacaatgtgccgggttccgatttcagcatcggggcagacaccgccctgaacactatcaccgacacctgcgaccgcatcaagcagtccgccagcggaaccaagcggcgcgtgttcatcatcgagaccatgggcggctactgtggctacctggccaacatgggggggctcgcggctggagctgatgccgcatacattttcgaagagcccttcgacatcagggatctgcagtccaacgtggagcacctgacggagaaaatgaagaccaccatccagagaggccttgtgctcagaaatgagagctgcagtgaaaactacaccaccgacttcatttaccagctgtattcagaagagggcaaaggcgtgtt

SEQ ID NO: 313 - DNA, 1146 bp, Homo Sapiens
  misc_feature (835)..(835): n is a, c, g, or t
  misc_feature (846)..(846): n is a, c, g, or t
  misc_feature (861)..(861): n is a, c, g, or t
  misc_feature (863)..(863): n is a, c, g, or t
  misc_feature (934)..(934): n is a, c, g, or t
  misc_feature (940)..(940): n is a, c, g, or t
  misc_feature (943)..(943): n is a, c, g, or t
  misc_feature (966)..(966): n is a, c, g, or t
  misc_feature (980)..(980): n is a, c, g, or t
  misc_feature (992)..(992): n is a, c, g, or t
  misc_feature (1011)..(1011): n is a, c, g, or t
  misc_feature (1016)..(1016): n is a, c, g, or t
  misc_feature (1028)..(1028): n is a, c, g, or t
  misc_feature (1030)..(1030): n is a, c, g, or t
  misc_feature (1061)..(1061): n is a, c, g, or t
  misc_feature (1070)..(1071): n is a, c, g, or t
  misc_feature (1080)..(1081): n is a, c, g, or t
  misc_feature (1085)..(1085): n is a, c, g, or t
  misc_feature (1091)..(1091): n is a, c, g, or t
  misc_feature (1097)..(1097): n is a, c, g, or t
  misc_feature (1104)..(1104): n is a, c, g, or t
  misc_feature (1113)..(1113): n is a, c, g, or t
  misc_feature (1119)..(1119): n is a, c, g, or t
  misc_feature (1123)..(1123): n is a, c, g, or t
  misc_feature (1130)..(1131): n is a, c, g, or t
  misc_feature (1135)..(1135): n is a, c, g, or t
  misc_feature (1138)..(1138): n is a, c, g, or t
  misc_feature (1145)..(1145): n is a, c, g, or t
agagaaattactatgagaggatcgcatcaccatcaccatcacggatcctatttaggtgacactatagaatcgtcgacccacgcgtccgcgaggagaatggagaccaaacctgtgataacctgtctcaaaaccctcctcatcatctactccttcgtcttctggatcactggggtgatcctgctggctgttggagtctggggcaaacttactctgggcacctatatctcccttattgccgagaactccacaaatgctccctatgtgctcatcggaactggcaccactattgttgtctttggcctgtttggatgctttgctacatgtcgtggtagcccatggatgctgaaactgtatgccatgtttctgtccctggtgttcctggctgagctcgtagctggcatttcagggtttgtgtttcgtcatgagatcaaggacaccttcctgaggacttacacggacgctatgcagacttacaatggcaatgatgagaggagccgggcagtggaccatgtgcagcgcagcctgagctgctgtggtgtgcagaactacaccaactggagcaccagcccctacttcctggagcatggcatcccccccagctgctgcatgaacgaaactgattgtaatccccaggatctacacaatctgactgtggccgccaccaaagttaaccagaagggttgttatgatctggtaactagtttcatggagactaacatgggaatcatcgctggagtggcgtttggaatcgcattctcccagttaattggcatgctgctggcctgctgtctgtcccggttcatcacggccaatcagtatgagatggtgtaagganaagtctttcanaaatgacggaataananacctgttttaaaaaggaactgcagcaatctttgaaaaactccaaaaaatgttaaagcacagtacataatanacttgnccntgctccctctccccttaccccanaacgtgcaactganactcccacccantctctgctccacctttcancccangtcacgggtaangnccattttgggaaaccctgttgggccaaaaangtaaccagnnccccctgcnnctantcctantgaacntcccccnaggccctgnaagggnccanccccccnntttnaantgggtcna

SEQ ID NO: 314 - DNA, 1166 bp, Homo Sapiens
  misc_feature (779)..(779): n is a, c, g, or t
  misc_feature (893)..(893): n is a, c, g, or t
  misc_feature (916)..(916): n is a, c, g, or t
  misc_feature (922)..(922): n is a, c, g, or t
  misc_feature (935)..(935): n is a, c, g, or t
  misc_feature (940)..(940): n is a, c, g, or t
  misc_feature (943)..(943): n is a, c, g, or t
  misc_feature (965)..(965): n is a, c, g, or t
  misc_feature (971)..(971): n is a, c, g, or t
  misc_feature (982)..(982): n is a, c, g, or t
  misc_feature (998)..(998): n is a, c, g, or t
  misc_feature (1007)..(1007): n is a, c, g, or t
  misc_feature (1015)..(1015): n is a, c, g, or t
  misc_feature (1017)..(1017): n is a, c, g, or t
  misc_feature (1019)..(1019): n is a, c, g, or t
  misc_feature (1052)..(1052): n is a, c, g, or t
  misc_feature (1057)..(1057): n is a, c, g, or t
  misc_feature (1083)..(1083): n is a, c, g, or t
  misc_feature (1095)..(1095): n is a, c, g, or t
  misc_feature (1101)..(1101): n is a, c, g, or t
  misc_feature (1127)..(1127): n is a, c, g, or t
  misc_feature (1129)..(1130): n is a, c, g, or t
  misc_feature (1133)..(1133): n is a, c, g, or t
  misc_feature (1135)..(1135): n is a, c, g, or t
  misc_feature (1148)..(1148): n is a, c, g, or t
  misc_feature (1150)..(1150): n is a, c, g, or t
  misc_feature (1158)..(1159): n is a, c, g, or t
  misc_feature (1165)..(1165): n is a, c, g, or t
aattagagaaattactatgagaggatcgcatcaccatcaccatcacggatcctatttaggtgacactatagaatcgtcgacccacgcgtccggaaaggatctgctactgcagctggaggatgagacactaaagctagtggagccacagagccaggcactgctgcacgcccaacccatcatcagcatccgcgtgtggggcgtcgggcgggacagtggaagagagagggactttgcctacgtagctcgtgataagctgacccagatgctcaagtgccacgtgtttcgctgtgaggcacctgccaagaacatcgccaccagcctgcatgagatctgctctaagatcatggccgaacggcgtaatgcccgctgcttggtaaatggactctccctggaccactctaaacttgtggatgtccctttccaagtggaattcccagcgcctaagaatgagttggtccagaagttccaagtctattacctggggaatgtacctgttgctaaacctgttggggtagatgtgattaatggggccctcgagtcagtcctgtcctccagcagccgtgaacaatggaccccaagtcatgtcagtgtggcccctgctaccctcaccatcttgcaccagcagacagaggcagtgctgggagagtgtcgggtgcgtttcctctccttcctggccgtgggcagagatgtccacacgtttgcattcatcatggctgccggcccagcctccttctgctgccacatgttctggtgcgagcccaatgctgccagcctctcanaggctgtgcaggctgcgtgcatgcttcgctaccagaagtgtctggatgcccgttcccaggcctccacctcctgcctcccagcaccccctgctgagtctgtggcacggcgtgtanggtggactgtccgcaggggtgtncagtcnctgtggggctccntgaanccnaacggctgggggcccatacccnatgaanaagcccccacnttccctccacctgctngtgttgggnccccaggnantnaagggtgtgggtcagggagggtctaaagctatnctagnctcagcctcccaaaatgccccccccnaaaactacggtncctgcntagaactggggaggaaaatttatccntnnagnantgaaacctggggngntaaaaaannaaaagna

SEQ ID NO: 315 - DNA, 853 bp, Homo Sapiens
  misc_feature (2)..(2): n is a, c, g, or t
  misc_feature (322)..(322): n is a, c, g, or t
  misc_feature (548)..(548): n is a, c, g, or t
  misc_feature (712)..(712): n is a, c, g, or t
  misc_feature (719)..(719): n is a, c, g, or t
  misc_feature (724)..(724): n is a, c, g, or t
  misc_feature (778)..(778): n is a, c, g, or t
  misc_feature (780)..(780): n is a, c, g, or t
  misc_feature (794)..(794): n is a, c, g, or t
  misc_feature (804)..(804): n is a, c, g, or t
  misc_feature (806)..(806): n is a, c, g, or t
  misc_feature (811)..(812): n is a, c, g, or t
  misc_feature (814)..(814): n is a, c, g, or t
  misc_feature (816)..(817): n is a, c, g, or t
  misc_feature (820)..(820): n is a, c, g, or t
  misc_feature (822)..(823): n is a, c, g, or t
  misc_feature (825)..(825): n is a, c, g, or t
  misc_feature (828)..(828): n is a, c, g, or t
  misc_feature (830)..(831): n is a, c, g, or t
  misc_feature (833)..(833): n is a, c, g, or t
  misc_feature (839)..(839): n is a, c, g, or t
  misc_feature (845)..(845): n is a, c, g, or t
  misc_feature (848)..(848): n is a, c, g, or t
antagagaaattactatgagaggatcgcatcaccatcaccatcacggatcctatttaggtgacactatagaatcgtcgacccacgcgtccggcctcgccagctcgccccggcactgcgcacttgccagccagtccgcccgtccggagcccggctcgctggggcagcatggcggggtcgccgctgctctgggggccgcgggccgggggcgtcggccttttggtgctgctgctgctcggcctgtttcggccgccccccgcgctctgcgcgcggccggtaaaggagccccgcggcctaagcgcagcgtctccgcccttggctganactggcgctcctcgccgcttccggcggtcagtgccccgaggtgaggcggcgggggcggtgcaggagctggcgcgggcgctggcgcatctgctggaggccgaacgtcaggagcgggcgcgggccgaggcgcaggaggctgaggatcagcaggcgcgcgtcctggcgcagctgctgcgcgtctggggcgccccccgcaactctgatccggctctgggcctggacgacnaccccgacgcgcctgcagcgcagctcgctcgcgctctgctccgcgcccgccttgaccctgccgccctcgcagcccagcttgtccccgcgcccgtccccgccgcggcgctccgaccccggcccccggtctacaacgacggccccgcgggcccggatgctgaagangcaggcnacaanacacccgacgtggaacccgaactgttgaagtacttgctgggacggattcttgcngnaaacgcggactccnaaggggtggnanccccnngncnnctncnncntgncnncnaacaanaatgtnggnctctg

SEQ ID NO: 316 - DNA, 1100 bp, Homo Sapiens
  misc_feature (855)..(855): n is a, c, g, or t
  misc_feature (972)..(972): n is a, c, g, or t
  misc_feature (996)..(996): n is a, c, g, or t
  misc_feature (998)..(998): n is a, c, g, or t
  misc_feature (1016)..(1016): n is a, c, g, or t
  misc_feature (1022)..(1022): n is a, c, g, or t
  misc_feature (1024)..(1024): n is a, c, g, or t
  misc_feature (1027)..(1027): n is a, c, g, or t
  misc_feature (1037)..(1037): n is a, c, g, or t
  misc_feature (1063)..(1063): n is a, c, g, or t
  misc_feature (1084)..(1084): n is a, c, g, or t
  misc_feature (1087)..(1087): n is a, c, g, or t
  misc_feature (1094)..(1094): n is a, c, g, or t
  misc_feature (1100)..(1100): n is a, c, g, or t
agagaaattactatgagaggatcgcatcaccatcaccatcacggatcctatttaggtgacactatagaatcgtcgacccacgcgtccgtgaaagccacagatcaggaaaagagcagaaaactacatgaacttacggttatgcaagatagacgagaacaagcaagacaagacttgaagggtttggaagagacagtggcaaaagaacttcagactttacacaacctgcgcaaactctttgttcaggacctggctacaagagttaaaaagagtgctgagattgattctgatgacaccggaggcagcgctgctcagaagcaaaaaatctcctttcttgaaaataatcttgaacagctcactaaagtgcacaaacagttggtacgtgataatgcagatctccgctgtgaacttcctaagttggaaaagcgacttcgagctacagctgagagagtgaaagctttggaatcagcactgaaagaagctaaagaaaatgcatctcgtgatcgcaaacgctatcagcaagaagtagatcgcataaaggaagcagtcaggtcaaagaatatggccagaagagggcattctgcacagattgctaaacctattcgtcccgggcaacatccagcagcttctccaactcacccaagtgcaattcgtggaggaggtgcatttgttcagaacagccagccagtggcagtgcgaggtggaggaggcaaacaagtgtaatcgtttatacatacccacaggtgttaaaaagtaatcgaagtacgaagaggacatggtatcaagcagtcattcaatgactataacctctactcccttgggattgtagaattataacttttaaaaaaaatgtataanttatacctggcctgtacagctgtttcctacctactcttcttgtaaactctgctgcttcccaacacaactagagtgcattttggcatcttaggagggaaaaggacagtttacaactgnggccctatttattacccagtttgncnatcgggcctaaatttagncttacngngcnagctactgtncctaaaggacggacttttggattttngggaggttatttttaaccccnttnaataccnaccgcn

SEQ ID NO: 317 - DNA, 811 bp, Homo Sapiens
ctatgagaggatcgcatcaccatcaccatcacggatcctatttaggtgacactatagaatcgtcgacccacgcgtccgcccacgcgtccggcgctcgcagctcgcaggcgccgcgtagccgtcgccaccgccgccagcccgtgcgccctcggcgcgtacccgccgcgctcccatccccgccgccggccaggggcgcgctcggccgccccggacagtgtcccgctgcggctccgcggcgatggccaccaagatcgacaaagaggcttgccgggcggcgtacaacctggtgcgcgacgacggctcggccgtcatctgggtgacttttaaatatgacggctccaccatcgtccccggcgagcagggagcggagtaccagcacttcatccagcagtgcacagatgacgtccggttgtttgccttcgtgcgcttcaccaccggggatgccatgagcaagaggtccaagtttgccctcatcacgtggatcggtgagaacgtcagcgggctgcagcgcgccaaaaccgggacggacaagaccctggtgaaggaggtcgtacagaatttcgctaaggagtttgtgatcagtgatcggaaggagctggaggaagatttcatcaagagcgagctgaagaaggcggggggagccaattacgacgcccagacggagtaaccccagcccccgccacaccaccccttgccaaagtcatctgcctgctccccgggggagaggaccgccggcctcagctactagcccaccagcccaccagggagaagagaagccatgagaggcagcgcccgccaccctgtgtccaca

SEQ ID NO: 318 - DNA, 1399 bp, Homo Sapiens
  misc_feature (814)..(814): n is a, c, g, or t
  misc_feature (920)..(920): n is a, c, g, or t
  misc_feature (949)..(949): n is a, c, g, or t
  misc_feature (955)..(955): n is a, c, g, or t
  misc_feature (973)..(973): n is a, c, g, or t
  misc_feature (1009)..(1009): n is a, c, g, or t
  misc_feature (1015)..(1015): n is a, c, g, or t
  misc_feature (1028)..(1028): n is a, c, g, or t
  misc_feature (1040)..(1040): n is a, c, g, or t
  misc_feature (1048)..(1048): n is a, c, g, or t
  misc_feature (1064)..(1064): n is a, c, g, or t
  misc_feature (1090)..(1090): n is a, c, g, or t
  misc_feature (1097)..(1097): n is a, c, g, or t
  misc_feature (1102)..(1102): n is a, c, g, or t
  misc_feature (1106)..(1106): n is a, c, g, or t
  misc_feature (1110)..(1110): n is a, c, g, or t
  misc_feature (1119)..(1119): n is a, c, g, or t
  misc_feature (1123)..(1123): n is a, c, g, or t
  misc_feature (1126)..(1126): n is a, c, g, or t
  misc_feature (1130)..(1130): n is a, c, g, or t
  misc_feature (1142)..(1142): n is a, c, g, or t
  misc_feature (1146)..(1146): n is a, c, g, or t
  misc_feature (1152)..(1152): n is a, c, g, or t
  misc_feature (1166)..(1166): n is a, c, g, or t
  misc_feature (1174)..(1174): n is a, c, g, or t
  misc_feature (1198)..(1198): n is a, c, g, or t
  misc_feature (1200)..(1200): n is a, c, g, or t
  misc_feature (1202)..(1203): n is a, c, g, or t
  misc_feature (1214)..(1214): n is a, c, g, or t
  misc_feature (1217)..(1217): n is a, c, g, or t
  misc_feature (1221)..(1221): n is a, c, g, or t
  misc_feature (1230)..(1230): n is a, c, g, or t
  misc_feature (1236)..(1236): n is a, c, g, or t
  misc_feature (1241)..(1241): n is a, c, g, or t
  misc_feature (1256)..(1256): n is a, c, g, or t
  misc_feature (1271)..(1271): n is a, c, g, or t
  misc_feature (1276)..(1276): n is a, c, g, or t
  misc_feature (1278)..(1278): n is a, c, g, or t
  misc_feature (1293)..(1293): n is a, c, g, or t
  misc_feature (1296)..(1296): n is a, c, g, or t
  misc_feature (1300)..(1300): n is a, c, g, or t
  misc_feature (1307)..(1308): n is a, c, g, or t
  misc_feature (1322)..(1322): n is a, c, g, or t
  misc_feature (1324)..(1324): n is a, c, g, or t
  misc_feature (1327)..(1328): n is a, c, g, or t
  misc_feature (1339)..(1339): n is a, c, g, or t
  misc_feature (1344)..(1344): n is a, c, g, or t
  misc_feature (1362)..(1362): n is a, c, g, or t
  misc_feature (1367)..(1367): n is a, c, g, or t
  misc_feature (1385)..(1385): n is a, c, g, or t
  misc_feature (1391)..(1391): n is a, c, g, or t
  misc_feature (1393)..(1393): n is a, c, g, or t
  misc_feature (1398)..(1399): n is a, c, g, or t
tagagaaattactatgagaggatcgcatcaccatcaccatcacggatcctatttaggtgacactatagaatcgtcgacccacgcgtccggacgccatgacgccccggctggtgtgtgtcggtgtgtatgtgtgtgtgtgagtgtgcgcgctccgagtgtgtgtgtatttgtgtatcggcggtcccgcaggtcccggatgttgcggacagtatgaggcaagcgcagggggcggggaccagcagctgtcgccgccgctctcaggctctgggaaccacccttctactttctgtctctaggaatttcactactctagggtgaagagggaacagaaatctttgccccctgactttggaaatctcgtttaaccttcaaactggcgatgtcaagggttccaagtcctccacctccggcagaaatgtcgagtggccccgtagctgagagttggtgctacacacagatcaaggtagtgaaattctcctacatgtggaccatcaataactttagcttttgccgggaggaaatgggtgaagtcattaaaagttctacattttcatcaggagcaaatgataaactgaaatggtgtttgcgagtaaaccccaaagggttagatgaagaaagcaaagattacctgtcactttacctgttactggtcagctgtccaaagagtgaagttcgggcaaaattcaaattctccatcctgaatgccaagggagaagaaaccaaagctatggagagtcaacgggcatataggtttgtgcaaggcaaagactggggattcaagaaattcatccgtagagattttcttttggatgangccaacgggcttctccctgatgacaagcttaccctcttctgcgaggtgagtgttgtgcaagattctgtcaacattttctggccagaataccatgaacatggtaaangttcctgaatgccggctggcaaatgaatnaggagnactgtgggaaaattcccnggttcaaaaactgctgcttgtgtgttgccggccagnaattcnaggctcacaaagnctatcttaacanctcgttcnccggtttttaatgccntgtttgaacctgaaatggaaggaaancaaaaanaatcnagtnaaantcaaggatngganccngaanttttaaagaaangagncctttntttaacggggaagncccaaccnccaaaaaatgcttaaaatttttgnancnnctaaaaaattnccngganccttaaagncagggnaaganccccctgcaaaaacngcccgggaaaacccnaaaantntcccctggccaaccnccngggnaaaattnnaaacccgggggggntnccnncaatacctccnaattngaaacccgggggaaaaanggggnccccccttggggaaaaancccttntnaaaann

SEQ ID NO: 319 - DNA, 1014 bp, Homo Sapiens
  misc_feature (832)..(832): n is a, c, g, or t
  misc_feature (835)..(835): n is a, c, g, or t
  misc_feature (843)..(843): n is a, c, g, or t
  misc_feature (850)..(850): n is a, c, g, or t
  misc_feature (853)..(853): n is a, c, g, or t
  misc_feature (879)..(879): n is a, c, g, or t
  misc_feature (883)..(883): n is a, c, g, or t
  misc_feature (905)..(905): n is a, c, g, or t
  misc_feature (908)..(908): n is a, c, g, or t
  misc_feature (916)..(916): n is a, c, g, or t
  misc_feature (919)..(919): n is a, c, g, or t
  misc_feature (941)..(941): n is a, c, g, or t
  misc_feature (947)..(947): n is a, c, g, or t
  misc_feature (949)..(949): n is a, c, g, or t
  misc_feature (955)..(955): n is a, c, g, or t
  misc_feature (957)..(957): n is a, c, g, or t
  misc_feature (974)..(974): n is a, c, g, or t
  misc_feature (977)..(977): n is a, c, g, or t
  misc_feature (980)..(980): n is a, c, g, or t
  misc_feature (983)..(983): n is a, c, g, or t
  misc_feature (988)..(988): n is a, c, g, or t
  misc_feature (990)..(991): n is a, c, g, or t
  misc_feature (993)..(994): n is a, c, g, or t
  misc_feature (996)..(996): n is a, c, g, or t
  misc_feature (999)..(999): n is a, c, g, or t
  misc_feature (1001)..(1002): n is a, c, g, or t
  misc_feature (1005)..(1006): n is a, c, g, or t
  misc_feature (1008)..(1008): n is a, c, g, or t
attagagaaattactatgagaggatcgcatcaccatcaccatcacggatcctatttaggtgacactatagaatcgtcgacccacgcgtccggcctgtgcccagatcctgggagaaccccagccgagcccagcctagcccgagcccagcccgagcggagccggagccccaagcccgagccgcgcccagcccgagcagagccctccagccgctcaccccgcgtgccaccccagcgaccctcagccgctctctgcccttctctcggccccgcgcccgccctcgcggcccctctgcccaatgaaactggccgcgatgatcaagaagatgtgcccgagcgactcggagctgagtatcccggccaagaactgctatcgcatggtcatcctcggctcgtccaaggtgggcaagacggccatcgtgtcgcgcttcctcaccggccgcttcgaggacgcctacacgcctaccatcgaggacttccaccgcaagttctactccatccgcggcgaggtctaccagctcgacatcctcgacacgtccggcaaccacccgttccccgccatgcggcgcctctccatcctcacaggagacgttttcatcctggtgttcagtctggacaaccgcgactccttcgaggaggtgcagcggctcaggcagcagatcctcgacaccaagtcttgcctcaagaacaaaaccaaggagaacgtggacgtgcccctggtcatctgcggcaacaagggtgaccgcgacttctaccgcgaggtggaccagcgcgagatcgagcagctggtgggcgacgacccccagcgctgcgcctacttcgagatctcggccaanaanaacagcancctggancanatgttccgcgcgctcttcgccatggncaanctgcccagcgagatgagcccanacntgcaccgnaanggtctcggtgcatactgcaacntgctgnanaaaaangngctgcggaaaaaaaaantgntgnggnccggnanngnngnggngnnggnnanccgggg

SEQ ID NO: 320 - DNA, 884 bp, Homo Sapiens
  misc_feature (651)..(651): n is a, c, g, or t
  misc_feature (664)..(664): n is a, c, g, or t
  misc_feature (705)..(705): n is a, c, g, or t
  misc_feature (711)..(711): n is a, c, g, or t
  misc_feature (715)..(715): n is a, c, g, or t
  misc_feature (755)..(755): n is a, c, g, or t
  misc_feature (783)..(783): n is a, c, g, or t
  misc_feature (793)..(793): n is a, c, g, or t
  misc_feature (803)..(803): n is a, c, g, or t
  misc_feature (816)..(816): n is a, c, g, or t
  misc_feature (828)..(828): n is a, c, g, or t
  misc_feature (836)..(836): n is a, c, g, or t
  misc_feature (838)..(838): n is a, c, g, or t
  misc_feature (842)..(842): n is a, c, g, or t
  misc_feature (846)..(846): n is a, c, g, or t
  misc_feature (851)..(851): n is a, c, g, or t
  misc_feature (854)..(854): n is a, c, g, or t
  misc_feature (860)..(860): n is a, c, g, or t
  misc_feature (864)..(864): n is a, c, g, or t
  misc_feature (866)..(866): n is a, c, g, or t
  misc_feature (871)..(871): n is a, c, g, or t
  misc_feature (876)..(876): n is a, c, g, or t
  misc_feature (878)..(878): n is a, c, g, or t
atagagagaattactatgagaggatcgcatcaccatcaccatcacggatcctatttaggtgacactatagaatcgtcgacccacgcgtccgagaactgctccaccccgctggctctgcccactcgagacctcaatgccacctttgatctctctgaggagcctccctcaaagcccagtttccatgaatgcattggctgggacaaaataccccaggagctgagcaggctggaccagcccttcatccccagggcacctgtgcccctgttcaccatgaagggccccaagccaacatcttccctccctgggacctctgcctgcaagaagaagcgcgttgcgagttcctcagtctcccatggccgcagccgcatcgcccgcctccccagcagcactttgaagaggccagctgggccccttgtactcccaggtgactggcactagggacagggatagcctgggccatggaggccgatgaagacaagaaggaggaggggacggggagctgatacccaaaagaaaggagggcctagggtattgccaagcatctcagggatgctgctgatgagacaggtgggaggtgggctggaggacggggacagagcgtcactttccttcctcgctgcactccccgccacccatccaactggcctgcanagctgcccttgantcccctgtgccctagcaaccggaggaatggaaaggacctcntcaggntggngagagcactctcagcagggaacggcgtcaccaaggtgtcntgaccgccagaatgtcctgaccaccaangtgtcctaanctaaccggcncctctgctggaanaccccctcttgnaacctgtnanccancctngcacnaanaagctngaancntgtcnttccntnaccttg

SEQ ID NO: 321 - DNA, 1179 bp, Homo Sapiens
  misc_feature (1)..(1): n is a, c, g, or t
  misc_feature (3)..(3): n is a, c, g, or t
  misc_feature (889)..(889): n is a, c, g, or t
  misc_feature (927)..(927): n is a, c, g, or t
  misc_feature (1002)..(1002): n is a, c, g, or t
  misc_feature (1005)..(1005): n is a, c, g, or t
  misc_feature (1023)..(1023): n is a, c, g, or t
  misc_feature (1027)..(1027): n is a, c, g, or t
  misc_feature (1045)..(1045): n is a, c, g, or t
  misc_feature (1054)..(1054): n is a, c, g, or t
  misc_feature (1056)..(1056): n is a, c, g, or t
  misc_feature (1059)..(1059): n is a, c, g, or t
  misc_feature (1069)..(1069): n is a, c, g, or t
  misc_feature (1077)..(1077): n is a, c, g, or t
  misc_feature (1081)..(1082): n is a, c, g, or t
  misc_feature (1092)..(1093): n is a, c, g, or t
  misc_feature (1095)..(1095): n is a, c, g, or t
  misc_feature (1099)..(1099): n is a, c, g, or t
  misc_feature (1103)..(1103): n is a, c, g, or t
  misc_feature (1106)..(1106): n is a, c, g, or t
  misc_feature (1113)..(1113): n is a, c, g, or t
  misc_feature (1125)..(1125): n is a, c, g, or t
  misc_feature (1141)..(1141): n is a, c, g, or t
  misc_feature (1158)..(1158): n is a, c, g, or t
  misc_feature (1174)..(1174): n is a, c, g, or t
nantagagaaattactatgagaggatcgcatcaccatcaccatcacggatcctatttaggtgacactatagaatcgtcgacccacgcgtccgattcattcaccatccaggcctatgattgtgggaagggacctgatggcaccaacgtgaaaaagtctcataaagcaactgttcatattcaggtgaacgacgtgaatgagtacgcgcccgtgttcaaggagaagtcctacaaagccacggtcatcgaggggaagcagtacgacagcattttgagggtggaggccgtggatgccgactgctcccctcagttcagccagatttgcagctacgaaatcatcactccagacgtgccctttactgttgacaaagatggttatataaaaaacacagagaaattaaactacgggaaagaacatcaatataagctgaccgtcactgcctatgactgtgggaagaaaagagccacagaagatgttttggtgaagatcagcattaagcccacctgcacccctgggtggcaaggatggaacaacaggattgagtatgagccgggcaccggcgcgttggccgtctttccaaatatccacctggagacatgtgacgagccagtcgcctcagtacaggccacagtggagctagaaaccagccacatagggaaaggctgcgaccgagacacctactcagagaagtccctccaccggctctgtggtgcggccgctccctatagtgagtcgtattaagcttaattagctgagcttggactcctgttgatagatccagtaatgacctcagaactccatctggatttgttcagaacgctcggttgccgccgggcgtttttttattggtgagaatccaagctagcttggcgagattttcaggagctaagnaagctaaaatggagaaaaaaatcactggatataccacngttgatatatcccaatggcatcgtaaagaacattttgaggcatttcagtcagttgctcaatgtacctataaccanacngttcagctggaaattacngccntttttaaaaaccgtaaanaaaaataancncangttttatccnggcctttnttcnnattcttgccnncntgangaangcnctcccgnaattcctatggnattgaaaaacgggganctggggaattgggaaanggttcccccttgtacncgttt

SEQ ID NO: 322 - DNA, 616 bp, Homo Sapiens
  misc_feature (1)..(1): n is a, c, g, or t
  misc_feature (6)..(6): n is a, c, g, or t
  misc_feature (18)..(19): n is a, c, g, or t
  misc_feature (21)..(21): n is a, c, g, or t
  misc_feature (73)..(73): n is a, c, g, or t
  misc_feature (79)..(79): n is a, c, g, or t
  misc_feature (93)..(93): n is a, c, g, or t
  misc_feature (101)..(101): n is a, c, g, or t
naattngagaaaattacnntnagagggatgcataccatcaccatcacggatcctatttaggtgacactatagnaatcgntcgacccacgccgntccggcgntaagcaagggggacaagccggtgacctacgaggaggcacacgcgccgcactacatcgcccaccgtaaaggctggctgtcgctgcacacaggtaacctggatggagaggaccatgccgcagagcgaacggtggaggatgttttccttcgcaagttcatgtggggtaccttcccaggctgcctggctgaccagctggttttaaagcgccggggtaaccagttggagatctgtgccgtggtcctgaggcagttgtctccacacaagtactacttcctcgtgggctacagtgaaactttgctgtcctacttttacaaatgtcctgtgcgactccacctccaaactgtgccctcaaaggttgtgtataagtacctctagaacaatccccttttttccatcaagctgtagcctgcagagaatggaaacgtgggaaaggaatggtatgtgggggaaatgcatcccctcagaggactgaggcatagtctctcatctgctattgaataaagaccttctatcttg

SEQ ID NO: 323 - DNA, 1029 bp, Homo Sapiens
  misc_feature (886)..(886): n is a, c, g, or t
  misc_feature (913)..(913): n is a, c, g, or t
  misc_feature (922)..(922): n is a, c, g, or t
  misc_feature (971)..(971): n is a, c, g, or t
  misc_feature (986)..(986): n is a, c, g, or t
  misc_feature (994)..(994): n is a, c, g, or t
  misc_feature (1000)..(1002): n is a, c, g, or t
  misc_feature (1007)..(1020): n is a, c, g, or t
attagagaaattactatgagaggatcgcatcaccatcaccatcacggatcctatttaggtgacactatagaatcgtcgacccacgcgtccgatttggaacattatctggacagtattgaaaaccttccctttgaattacagagaaactttcagctcatgagggacctagaccaaagaacagaggacctgaaggctgaaattgacaagttggccactgagtatatgagtagtgcccgcagcctgagctccgaggaaaaattggcccttctcaaacagatccaggaagcctatggcaagtgcaaggaatttggtgacgacaaggtgcagcttgccatgcagacctatgagatggtggacaaacacattcggcggctggacacagacctggcccgttttgaggctgatctcaaggagaaacagattgagtcaagtgactatgacagctcttccagcaaaggcaaaaagaaaggccggactcaaaaggagaagaaagctgctcgtgctcgttccaaagggaaaaactcggatgaagaagcccccaagactgcccagaagaagttaaagctcgtgcgcacaagtcctgagtatgggatgccctcagtgacctttggcagtgtccacccctctgatgtgttggatatgcctgtggatcccaacgaacccacctattgcctttgtcaccaggtctcctatggagagatgattggctgtgacaaccctgattgttccattgagtggttccattttgcctgtgtggggctgacaaccaagcctcgggggaaatggttttgcccacgctgctcccaagaacggaagaagaaatagataagggccttggattccaacacagtttcttccacatcccctgacttgggctagtgggcanaggaatgcctgtgcccaagaggatccntcctggganagggggccaaggtggaatgcaaatactcccatgtaaaaggaacttgggntaggtaaaataaaancttatacntgtttnnnaaaannnnnnnnnnnnnnaggggcggc

SEQ ID NO: 324 - DNA, 894 bp, Homo Sapiens
  misc_feature (1)..(2): n is a, c, g, or t
  misc_feature (4)..(4): n is a, c, g, or t
  misc_feature (107)..(107): n is a, c, g, or t
  misc_feature (435)..(435): n is a, c, g, or t
  misc_feature (533)..(533): n is a, c, g, or t
  misc_feature (555)..(555): n is a, c, g, or t
  misc_feature (579)..(579): n is a, c, g, or t
  misc_feature (603)..(603): n is a, c, g, or t
  misc_feature (634)..(634): n is a, c, g, or t
  misc_feature (653)..(653): n is a, c, g, or t
  misc_feature (667)..(667): n is a, c, g, or t
  misc_feature (677)..(677): n is a, c, g, or t
  misc_feature (716)..(716): n is a, c, g, or t
  misc_feature (723)..(723): n is a, c, g, or t
  misc_feature (727)..(727): n is a, c, g, or t
  misc_feature (765)..(765): n is a, c, g, or t
  misc_feature (767)..(767): n is a, c, g, or t
  misc_feature (774)..(775): n is a, c, g, or t
  misc_feature (785)..(785): n is a, c, g, or t
  misc_feature (795)..(796): n is a, c, g, or t
  misc_feature (806)..(806): n is a, c, g, or t
  misc_feature (808)..(808): n is a, c, g, or t
  misc_feature (821)..(821): n is a, c, g, or t
  misc_feature (827)..(827): n is a, c, g, or t
  misc_feature (831)..(831): n is a, c, g, or t
  misc_feature (838)..(838): n is a, c, g, or t
  misc_feature (841)..(843): n is a, c, g, or t
  misc_feature (852)..(852): n is a, c, g, or t
  misc_feature (855)..(855): n is a, c, g, or t
  misc_feature (860)..(861): n is a, c, g, or t
  misc_feature (863)..(863): n is a, c, g, or t
nnantagaagagaattaactatgagaggatcgcatcaccatcaccatcacgggatcctatttaggtgacactatagaatcgtcgacccacgcgtccgggaaaagcancctccgggcgggcggcggcggaggcggcggcggcggtggcggcggcggcggcgggggggccccagtgtgcggcgccagcggcttgtgcaaaaccaactgtggcgtgtgctgcaaggccgagctgggcctggcgccgtccgcgctgcccgcgggcagggtcatcaagccgcaggtcatcaaccaggctgtggggctgccggccagcggctcgctctactacttcaactacctggactcgaccgcgtacccgccgtctgagctcctcagcggccacctcttcccgtctggcctcctcaatgcgcaggcccccgccgccctggctgctcancccaagctctttctgctggagaacgccaagctggccggcctggctgcggacaagttcccccacccggctccctatccccataaggagcgcttgccggngccgctggagcaagtactgaangaaaactcggccctgactgccgancgcgaaaggcgtcaagggccacancaagctgccaggaggctccgcagatggcaancccaaaaacttcacctgcnaggtgtgcggcaangtgtttaacnctcactataatctcacccaccacatgccggtccacaccngagccanaccnttcgtgtgcaaagtctgccggaaaaagcttttcaccanancaaacanncttctgcaangcaaaaaatnntccacacccnantaaaaaacccacnttaaantgcnaacccanttnnngcaaatctnttnaaacnnancttccaacgtctcaaataacaattatcctaa

SEQ ID NO: 325 - DNA, 723 bp, Homo Sapiens
  misc_feature (693)..(693): n is a, c, g, or t
  misc_feature (695)..(696): n is a, c, g, or t
  misc_feature (700)..(700): n is a, c, g, or t
  misc_feature (704)..(704): n is a, c, g, or t
  misc_feature (706)..(706): n is a, c, g, or t
  misc_feature (708)..(708): n is a, c, g, or t
  misc_feature (711)..(714): n is a, c, g, or t
  misc_feature (720)..(720): n is a, c, g, or t
  misc_feature (723)..(723): n is a, c, g, or t
aatagagaaattaactatgagaggatcgcatcaccatcaccatcacggatcctatttaggtgacactatagaatcgtcgacccacgcgtccggggagtcgggccgcgactgtggtcgtttttataccttcccgcgcggacgccggcgctgccaacggaagggcggagacggagtttcgtcatgttggccaggcccatttgagatctttgaagatatcctcaacgtgaggctctgctgccatgaaggtgaagattaagtgctggaacggcgtggccacttggctctgggtggccaacgatgagaactgtggcatctgcaggatggcatttaacggatgctgccctgactgcaaggtgcccggcgacgactgcccgctggtgtggggccagtgctcccactgcttccacatgcattgcatcctcaagtggctgcacgcacagcaggtgcagcagcactgccccatgtgccgccaggaatggaagttcaaggagtgaggcccgacctggctctcgctggaggggcatcctgagactccttcctcatgctggcgccgatggctgctggggacagcgcccctgagctgcaacaaggtggaaacaagggctggagctgcgtttgttttgccatcactatgttgacacttttatccaataagtgaaaactcattaaactactcaaatcttaaaaaaaaanannaaanaaanananaannnnaaaaanaan

SEQ ID NO: 326 - DNA, 964 bp, Homo Sapiens
  misc_feature (898)..(898): n is a, c, g, or t
  misc_feature (900)..(900): n is a, c, g, or t
  misc_feature (938)..(938): n is a, c, g, or t
taagagaaattaactatgagaggatcgcatcaccatcaccatcacggatcctatttaggtgacactatagaatcgtcgacccacgcgtccggggagctctactgcctggaacacggcatccagcccgatggccagatgccaagtgacaagaccattgggggaggagatgactccttcaacaccttcttcagtgagacgggcgctggcaagcacgtgccccgggctgtgtttgtagacttggaacccacagtcattgatgaagttcgcactggcacctaccgccagctcttccaccctgagcagctcatcacaggcaaggaagatgctgccaataactatgcccgagggcactacaccattggcaaggagatcattgaccttgtgttggaccgaattcgcaagctggctgaccagtgcaccggtcttcagggcttcttggttttccacagctttggtgggggaactggttctgggttcacctccctgctcatggaacgtctctcagttgattatggcaagaagtccaagctggagttctccatttacccagcaccccaggtttccacagctgtagttgagccctacaactccatcctcaccacccacaccaccctggagcactctgattgtgccttcatggtagacaatgaggccatctatgacatctgtcgtagaaacctcgatatcgagcgcccaacctacactaaccttaaccgccttattagccagattgtgtcctccatcactgcttccctgagatttgatggagccctgaatgttgacctgacagaattccagaccaacctggtgccctacccccgcatccacttccctctggccacatatgcccctgtcatctctgctgaaaaagcctaccatgaacagctttctgtagcananatcaccaatgcttgctttgagccagccaaccagatggngaaaatggggaccctcccccatggaa

SEQ ID NO: 327 - DNA, 1179 bp, Homo Sapiens
  misc_feature (290)..(290): n is a, c, g, or t
  misc_feature (293)..(293): n is a, c, g, or t
  misc_feature (819)..(819): n is a, c, g, or t
  misc_feature (872)..(872): n is a, c, g, or t
  misc_feature (877)..(877): n is a, c, g, or t
  misc_feature (906)..(906): n is a, c, g, or t
  misc_feature (951)..(951): n is a, c, g, or t
  misc_feature (964)..(964): n is a, c, g, or t
  misc_feature (986)..(986): n is a, c, g, or t
  misc_feature (992)..(992): n is a, c, g, or t
  misc_feature (1000)..(1000): n is a, c, g, or t
  misc_feature (1005)..(1005): n is a, c, g, or t
  misc_feature (1010)..(1010): n is a, c, g, or t
  misc_feature (1031)..(1031): n is a, c, g, or t
  misc_feature (1042)..(1042): n is a, c, g, or t
  misc_feature (1057)..(1057): n is a, c, g, or t
  misc_feature (1060)..(1060): n is a, c, g, or t
  misc_feature (1062)..(1062): n is a, c, g, or t
  misc_feature (1071)..(1071): n is a, c, g, or t
  misc_feature (1078)..(1078): n is a, c, g, or t
  misc_feature (1083)..(1083): n is a, c, g, or t
  misc_feature (1086)..(1086): n is a, c, g, or t
  misc_feature (1091)..(1091): n is a, c, g, or t
  misc_feature (1105)..(1105): n is a, c, g, or t
  misc_feature (1108)..(1108): n is a, c, g, or t
  misc_feature (1111)..(1111): n is a, c, g, or t
  misc_feature (1115)..(1115): n is a, c, g, or t
  misc_feature (1129)..(1129): n is a, c, g, or t
  misc_feature (1131)..(1132): n is a, c, g, or t
  misc_feature (1137)..(1137): n is a, c, g, or t
  misc_feature (1141)..(1141): n is a, c, g, or t
  misc_feature (1145)..(1145): n is a, c, g, or t
  misc_feature (1151)..(1151): n is a, c, g, or t
  misc_feature (1154)..(1154): n is a, c, g, or t
  misc_feature (1169)..(1169): n is a, c, g, or t
  misc_feature (1171)..(1171): n is a, c, g, or t
  misc_feature (1174)..(1174): n is a, c, g, or t
  misc_feature (1176)..(1176): n is a, c, g, or t
tagagaaattactatgaagaggatcgcatcaccatcaccatcacggatcctatttaggtgacactatagaatcgtcgacccacgcgtccgcgcatccccagcccgccgccatggccgcctacaaactggtgctgatccggcacggcgagagcgcatggaacctggagaaccgcttcagcggctggtacgacgccgacctgagcccggcgggccacgaggaggcgaagcgcggcgggcaggcgctacgagatgctggctatgagtttgacatctgcttcacctcagtgcanaanagagcgatccggaccctctggacagtgctagatgccattgatcagatgtggctgccagtggtgaggacttggcgcctcaatgagcggcactatgggggtctaaccggtctcaataaagcagaaactgctgcaaagcatggtgaggcccaggtgaagatctggaggcgctcctatgatgtcccaccacctccgatggagcccgaccatcctttctacagcaacatcagtaaggatcgcaggtatgcagacctcacagaagatcagctaccctcctgtgagagtctgaaggatactattgccagagctctgcccttctggaatgaagaaatagttccccagatcaaggaggggaaacgtgtactgattgcagcccatggcaacagcctccggggcattgtcaagcatctggagggtctctctgaagaggctatcatggagctgaacctgccgactggtattcccattgtctatgaattggacaagaacttgaagcctatcaagcccatgcagtttctgggggatgaanagacggtgcgcaaagccatggaagctgtggctgcccagggcaaggccaaaaantgaangccggcggggaggatactgtccccaggancaccctccctgcccgtcttgtccctctgccccctcccacctgcanatgtcacactganccacatctgtaaacatcttganttgtanctgcaaanggggnaccantggctcccattttcattttanccattttgtcncctgcaccccctccnttnanaaaatctantcaaaanaacanttntaaancaaagggttttcantcnaanctanggaaaaacctcccntnntccanaaantttnaaaaanaanggacttgggtttttncnaangnttt

SEQ ID NO: 328 - DNA, 798 bp, Homo Sapiens
  misc_feature (690)..(690): n is a, c, g, or t
  misc_feature (712)..(712): n is a, c, g, or t
  misc_feature (740)..(740): n is a, c, g, or t
  misc_feature (757)..(757): n is a, c, g, or t
  misc_feature (777)..(777): n is a, c, g, or t
  misc_feature (793)..(793): n is a, c, g, or t
  misc_feature (797)..(797): n is a, c, g, or t
aaattaactatgagaggatcgcatcaccatcaccatcacggatcctatttaggtgacactatagaatcgtcgacccacgcgtccgcccacgcgtccggcatcaaccctgatgaagctgttgcttatggtgcagctgtccaggcagccatcttgtctggagacaagtctgagaatgttcaagatttgctgctcttggatgtcactcctctttcccttggtattgaaactgctggtggagtcatgactgtcctcatcaagcgtaataccaccattcctaccaagcagacacagaccttcactacctattctgacaaccagcctggtgtgcttattcaggtttatgaaggcgagcgtgccatgacaaaggataacaacctgcttggcaagtttgaactcacaggcatacctcctgcaccccgaggtgttcctcagattgaagtcacttttgacattgatgccaatggtatactcaatgtctctgctgtggacaagagtacgggaaaagagaacaagattactatcactaatgacaagggccgtttgagcaaggaagacattgaacgtatggtccaggaagctgagaagtacaaagctgaagatgagaagcagagggacaaggtgtcatccaagaattcacttgagtcctatgccttcaacatgaaagcaactgttgaagatgagaaacttcanggcaagattaacgatgaggacnaccagaagattctggacaagtgtaatgnaaattatcaactggctngataaaatcagactgctganaaggaaaatttgaacntcanc

SEQ ID NO: 329 - DNA, 1294 bp, Homo Sapiens
  misc_feature (3)..(3): n is a, c, g, or t
  misc_feature (881)..(881): n is a, c, g, or t
  misc_feature (970)..(970): n is a, c, g, or t
  misc_feature (987)..(987): n is a, c, g, or t
  misc_feature (1001)..(1001): n is a, c, g, or t
  misc_feature (1003)..(1003): n is a, c, g, or t
  misc_feature (1008)..(1008): n is a, c, g, or t
  misc_feature (1012)..(1012): n is a, c, g, or t
  misc_feature (1020)..(1020): n is a, c, g, or t
  misc_feature (1031)..(1031): n is a, c, g, or t
  misc_feature (1037)..(1037): n is a, c, g, or t
  misc_feature (1056)..(1056): n is a, c, g, or t
  misc_feature (1062)..(1062): n is a, c, g, or t
  misc_feature (1065)..(1065): n is a, c, g, or t
  misc_feature (1090)..(1090): n is a, c, g, or t
  misc_feature (1094)..(1094): n is a, c, g, or t
  misc_feature (1110)..(1110): n is a, c, g, or t
  misc_feature (1133)..(1133): n is a, c, g, or t
  misc_feature (1143)..(1143): n is a, c, g, or t
  misc_feature (1151)..(1151): n is a, c, g, or t
  misc_feature (1162)..(1162): n is a, c, g, or t
  misc_feature (1181)..(1181): n is a, c, g, or t
  misc_feature (1186)..(1186): n is a, c, g, or t
  misc_feature (1190)..(1190): n is a, c, g, or t
  misc_feature (1193)..(1193): n is a, c, g, or t
  misc_feature (1198)..(1198): n is a, c, g, or t
  misc_feature (1201)..(1201): n is a, c, g, or t
  misc_feature (1207)..(1207): n is a, c, g, or t
  misc_feature (1212)..(1213): n is a, c, g, or t
  misc_feature (1218)..(1218): n is a, c, g, or t
  misc_feature (1221)..(1221): n is a, c, g, or t
  misc_feature (1224)..(1224): n is a, c, g, or t
  misc_feature (1229)..(1229): n is a, c, g, or t
  misc_feature (1232)..(1232): n is a, c, g, or t
  misc_feature (1252)..(1252): n is a, c, g, or t
  misc_feature (1262)..(1262): n is a, c, g, or t
  misc_feature (1266)..(1266): n is a, c, g, or t
  misc_feature (1269)..(1269): n is a, c, g, or t
  misc_feature (1281)..(1281): n is a, c, g, or t
  misc_feature (1284)..(1284): n is a, c, g, or t
atngagaaattactatgagaggatcgcatcaccatcaccatcacggatcctatttaggtgacactatagaatcgtcgacccacgcgtccggcggggagctggagccagagcggctaccccgaaagctgcgggccgagcttgaggccgcgctggggaagaagcacaagggcggtgatagctccagtggcccccaacgcttggtttctttccgtctcatccgggatctgcaccagcatctgagagaaagggattccaaactatacctccatgagctcctagaaggcagtgaaatctatctcccagaggttgtgaagcctccacggaacccagaactagttgcccggctggagaagattaagatacagctggccaatgaggaatataaacggatcacccgcaacgtcacttgtcaggatacaagacatggtgggactctcagcgacctgggaaagcaagtgagatcattgaaggctctggtcatcaccatcttcaatttcattgtcacggtggttgctgccttcgtctgcacttaccttggaagccaatatatcttcacagaaatggcctcgcgggtgctagctgcattaatcgtcgcctctgtggtgggtctggccgagctgtatgtcatggtgcgggcaatggaaggcgagctgggagaactgtaactggtgcttcatcatcaagtctagagaagactttgggggcttcaggctccaattggcagtcaccgactcagtcaacccatcagactttttgtattcagctccagttagtcagaagaccagcccaggccagctgctgtttctgtggggagccctaatcttctgtgaatttccaaagggagcattggaggagattgagataacacatctttaaaacanaaagaactggtcttggtctatcagtacctcttcctgaatctggtacccatctgccttctccagttcattctaaacactgctgggactanggtttttccatcaggancaatggaatccagncnttccnaaantaaaccanactgccttganttgtcntatgtacaactgatcccanctttcncanaatttttatgcaaactggaattganttcnaaacctccaaaaaaanaaaaggatcccctttcccatttnggctggaaangactgatnaaaacttcaanaaaaaaaatggtttctaangatgnaaantgnaacangcncctccnttttnnaaaanaanggnttagnccntttccaaaaaaaaaaacccnaaaataaggncccnggncctttttttaangancaaaacccat

SEQ ID NO: 330 - DNA, 928 bp, Homo Sapiens
  misc_feature (799)..(799): n is a, c, g, or t
  misc_feature (801)..(801): n is a, c, g, or t
  misc_feature (821)..(821): n is a, c, g, or t
  misc_feature (844)..(844): n is a, c, g, or t
  misc_feature (847)..(847): n is a, c, g, or t
  misc_feature (851)..(851): n is a, c, g, or t
  misc_feature (868)..(869): n is a, c, g, or t
  misc_feature (872)..(872): n is a, c, g, or t
  misc_feature (883)..(883): n is a, c, g, or t
  misc_feature (891)..(891): n is a, c, g, or t
  misc_feature (901)..(903): n is a, c, g, or t
  misc_feature (909)..(909): n is a, c, g, or t
  misc_feature (911)..(911): n is a, c, g, or t
  misc_feature (916)..(916): n is a, c, g, or t
  misc_feature (918)..(918): n is a, c, g, or t
  misc_feature (921)..(922): n is a, c, g, or t
tagagaaattactatgagaggatcgcatcaccatcaccatcacggatcctatttaggtgacactatagaatcgtcgacccacgcgtccgcgcgcacacgcacacgggcacacacgcgcgcacgggatcctgctccgctccgcggctcccccgccccggagagctccgcgatcagcacccgggacagcgccaccgcccacgtgcagggggtggggtccgggcggggctggcgcctcggcgtctcccgggagtgtcccgtccagccgccgagcagggtgcttgagtgtctctgcagaaaagactccaggaccccgccaccatgttcccggagcccccaaccccggggcctccatcgcccgacacgcctcccgactccagtcgcatcagccacggcccagtgcccccctgggccctggccaccatcgtgctggtctcaggcctcctcatcttcagctgctgtttctgtctctaccggaagagctgtcggaggcggacaggcaagaagagccaggcccaagcccaggtccaccttcaggaagtgaaggggctgggccagagttacatagacaaggtgcagccagaagtagaggagctggagccagcaccatccgggccagggcagcaggtggcagacaagcatgagctaggacgactgcagtactccctggattatgacttccagagtggccagctgctggtgggcattctgcaagcaatgggattggcagccttggatcttggtggctcctcggacccctatgtgcgggtctacctgctgccggacaaacggaggcggtacnanaccaaggtgcatcggcagangctgaaccctcactttggggaanacnttcnccttcaaggtcccctanntgnaactggggggnaagggtgntggtcatggnnntgtaanantttcnancgnnttctct

SEQ ID NO: 331 - DNA, 505 bp, Homo Sapiens
gaattagagaaattactatgagaggatcgcatcaccatcaccatcacggatcctatttaggtgacactatagaatcgtcgacccacgcgtccggtgatattgtagacatcaagggaatgggtactgttcaaaaaggaatgccccacaagtgttaccatggcaaaactggaagagtctacaatgttacccagcatgctgttggcattgttgtaaacaaacaagttaagggcaagattcttgccaagagaattaatgtgcgtattgagcacattaagcactctaagagccgagatagcttcctgaaacgtgtgaaggaaaatgatcagaaaaagaaagaagccaaagagaaaggtacctgggttcaactaaagcgccagcctgctccacccagagaagcacactttgtgagaaccaatgggaaggagcctgagctgctggaacctattccctatgaattcatggcataataggtgttaaaaaaaaaaataaaggacctctgggctac

SEQ ID NO: 332 - DNA, 814 bp, Homo Sapiens
  misc_feature (7)..(7): n is a, c, g, or t
  misc_feature (655)..(655): n is a, c, g, or t
  misc_feature (745)..(745): n is a, c, g, or t
  misc_feature (756)..(756): n is a, c, g, or t
  misc_feature (784)..(784): n is a, c, g, or t
  misc_feature (791)..(791): n is a, c, g, or t
  misc_feature (794)..(794): n is a, c, g, or t
  misc_feature (796)..(796): n is a, c, g, or t
  misc_feature (811)..(811): n is a, c, g, or t
  misc_feature (814)..(814): n is a, c, g, or t
tcttaangaggagaattaactatgagaggatcgcatcaccatcaccatcacggatcctatttaggtgacactatagaatcgtcgacccacgcgtccgccatggagggtgtagaagagaagaagaaggaggttcctgctgtgccagaaacccttaagaaaaagcgaaggaatttcgcagagctgaagatcaagcgcctgagaaagaagtttgcccaaaagatgcttcgaaaggcaaggaggaagcttatctatgaaaaagcaaagcactatcacaaggaatataggcagatgtacagaactgaaattcgaatggcgaggatggcaagaaaagctggcaacttctatgtacctgcagaacccaaattggcgtttgtcatcagaatcagaggtatcaatggagtgagcccaaaggttcgaaaggtgttgcagcttcttcgccttcgtcaaatcttcaatggaacctttgtgaagctcaacaaggcttcgattaacatgctgaggattgtagagccatatattgcatgggggtaccccaatctgaagtcagtaaatgaactaatctacaagcgtggttatggcaaaatcaataagaagcgaattgctttgacagataacgctttgattgctcgatctcttggtaaatacggcatcatcntgcatgggaggatttgattcatgagatctatactgttggaaaacgcttcaaagaggcaaataacttcctgtggcccttcaaattgtcttnctccccgaggnggaatgaagaaaaagacacccctttttngtaaaanggngnagatgctggccaaanggn

SEQ ID NO: 333 - DNA, 1147 bp, Homo Sapiens
  misc_feature (830)..(830): n is a, c, g, or t
  misc_feature (884)..(884): n is a, c, g, or t
  misc_feature (912)..(912): n is a, c, g, or t
  misc_feature (936)..(936): n is a, c, g, or t
  misc_feature (943)..(943): n is a, c, g, or t
  misc_feature (959)..(959): n is a, c, g, or t
  misc_feature (983)..(983): n is a, c, g, or t
  misc_feature (987)..(987): n is a, c, g, or t
  misc_feature (998)..(998): n is a, c, g, or t
  misc_feature (1014)..(1016): n is a, c, g, or t
  misc_feature (1022)..(1022): n is a, c, g, or t
  misc_feature (1030)..(1030): n is a, c, g, or t
  misc_feature (1032)..(1032): n is a, c, g, or t
  misc_feature (1048)..(1048): n is a, c, g, or t
  misc_feature (1050)..(1050): n is a, c, g, or t
  misc_feature (1070)..(1070): n is a, c, g, or t
  misc_feature (1077)..(1077): n is a, c, g, or t
  misc_feature (1080)..(1080): n is a, c, g, or t
  misc_feature (1089)..(1089): n is a, c, g, or t
  misc_feature (1107)..(1107): n is a, c, g, or t
  misc_feature (1118)..(1118): n is a, c, g, or t
  misc_feature (1124)..(1124): n is a, c, g, or t
  misc_feature (1131)..(1133): n is a, c, g, or t
  misc_feature (1135)..(1135): n is a, c, g, or t
  misc_feature (1137)..(1137): n is a, c, g, or t
  misc_feature (1140)..(1140): n is a, c, g, or t
  misc_feature (1142)..(1142): n is a, c, g, or t
  misc_feature (1144)..(1147): n is a, c, g, or t
caatagagaaattactatgagaggatcgcatcaccatcaccatcacggatcctatttaggtgacactatagaatcgtcgacccacgcgtccgggttttgctctagtgtttgggtttcttcgcggctgctcaagatgaaccgactcttcgggaaagcgaaacccaaggctccgccgcccagcctgactgactgcattggcacggtggacagtagagcagaatccattgacaagaagatttctcgattggatgctgagctagtgaagtataaggatcagatcaagaagatgagagagggtcctgcaaagaatatggtcaagcagaaagccttgcgagttttaaagcaaaagaggatgtatgagcagcagcgggacaatcttgcccaacagtcattcaacatggaacaagccaattataccatccagtctttgaaggacaccaagaccacggttgatgctatgaaactgggagtaaaggaaatgaagaaggcatacaagcaagtgaagatcgaccagattgaggatttacaagaccagctagaggatatgatggaagatgcaaatgaaatccaagaagcactgagtcgcagttatggcaccccagaactggatgaagatgatttagaagcagagttggatgcactaggtgatgagcttctggctgatgaagacagttcttatttggatgaggcagcatctgcacctgcaattccagaaggtgttcccactgatacaaaaaacaaggatggagttctggtggatgaatttggattgccacagatccctgcttcatagatttgcatcattcaagcatatcttgtaaacaaacccnttattatgggactaggaaatatttatctttccaaatttgccataacaaaatttnaggtttctttcctttctttgaaggaaantttaaattacattggctcttttanttttttnccattaagaaaactcnttgcttgggaatggctttcttccnaacnaaaaatttgantcccttttttccttannnaaaaancgaactcngntttaaaaagtattttnancccgaaagacttgttttccnttccttnaanaaaaatttngaaaataaaacctaaggnaaatgggaatncttttnaaaaaannnananaananannnn

SEQ ID NO: 334 - DNA, 1143 bp, Homo Sapiens
  misc_feature (824)..(824): n is a, c, g, or t
  misc_feature (910)..(910): n is a, c, g, or t
  misc_feature (924)..(924): n is a, c, g, or t
  misc_feature (953)..(953): n is a, c, g, or t
  misc_feature (955)..(955): n is a, c, g, or t
  misc_feature (965)..(965): n is a, c, g, or t
  misc_feature (987)..(987): n is a, c, g, or t
  misc_feature (994)..(994): n is a, c, g, or t
  misc_feature (997)..(997): n is a, c, g, or t
  misc_feature (1005)..(1005): n is a, c, g, or t
  misc_feature (1010)..(1010): n is a, c, g, or t
  misc_feature (1015)..(1015): n is a, c, g, or t
  misc_feature (1034)..(1035): n is a, c, g, or t
  misc_feature (1042)..(1042): n is a, c, g, or t
  misc_feature (1056)..(1056): n is a, c, g, or t
  misc_feature (1062)..(1062): n is a, c, g, or t
  misc_feature (1065)..(1065): n is a, c, g, or t
  misc_feature (1068)..(1068): n is a, c, g, or t
  misc_feature (1071)..(1071): n is a, c, g, or t
  misc_feature (1080)..(1080): n is a, c, g, or t
  misc_feature (1084)..(1085): n is a, c, g, or t
  misc_feature (1089)..(1089): n is a, c, g, or t
  misc_feature (1095)..(1095): n is a, c, g, or t
  misc_feature (1105)..(1105): n is a, c, g, or t
  misc_feature (1118)..(1118): n is a, c, g, or t
  misc_feature (1130)..(1130): n is a, c, g, or t
  misc_feature (1133)..(1133): n is a, c, g, or t
  misc_feature (1136)..(1136): n is a, c, g, or t
  misc_feature (1141)..(1143): n is a, c, g, or t
attagagaaattactatgagaggatcgcatcaccatcaccatcacggatcctatttaggtgacactatagaatcgtcgacccacgcgtccgcgtcctacaaatatgaagcagacacggtggacctgaattggtgcgtcatttccgacatggaagtcatcgagctgaacaaatgcacctcgggccaatcctttgaagtcatcctgaagccaccctcctttgatggggttcccgagttcaacgcctccctgccaaggcggcgagacccatccctggaagagatccagaagaaactagaagcggctgaggagcgaaggaagtaccaggaagcggagctcctgaaacacctagcagagaaacgggaacatgagagagaggtgatccaaaaggccattgaggaaaacaacaacttcatcaagatggctaaggaaaaactggcccagaagatggaatccaacaaggagaacagggaggcccacctcgccgccatgttggaacggctgcaagagaaggacaagcacgccgaggaggtgcggaaaaacaaggagctgaaggaagaggcctccaggtaaagcctagaggccaaagaactttccaggtcagccggacagctccagcagctccacgttccaggcagcctcgcccgccggctgcgctcccagcactggggtttggggggaggggggtggccaaggggcgtttcctctgcttttggtgtttgtacatgttaagaattgaccagtgaagccatcctatttgtttccggggaacaatgacggggtgggagaggggagaggagagagtttgggaaagggagatggagaanaactcaaggacattgcaaccctgcccggcgcaaatctgattttcacatctctacctggacattgagcctccaggcaccatgttganggaaagatgaaaanccaggggcggttaaaacttcagggtgaangnaaaaagtccntgggtggggcaacggctggcangggcccnccnaaaaaaancccancccanaggggggggtgaagtaccnngtggggnttgctttccccccntgccancanggnggnaataaggtntggnnttgngggggngaaaccatcntttttttgattcntcctggaccaantgnaanctttnnn

SEQ ID NO: 335 - DNA, 1167 bp, Homo Sapiens
  misc_feature (1)..(2): n is a, c, g, or t
  misc_feature (873)..(873): n is a, c, g, or t
  misc_feature (945)..(945): n is a, c, g, or t
  misc_feature (965)..(965): n is a, c, g, or t
  misc_feature (973)..(973): n is a, c, g, or t
  misc_feature (1014)..(1014): n is a, c, g, or t
  misc_feature (1033)..(1033): n is a, c, g, or t
  misc_feature (1056)..(1056): n is a, c, g, or t
  misc_feature (1066)..(1066): n is a, c, g, or t
  misc_feature (1069)..(1069): n is a, c, g, or t
  misc_feature (1075)..(1075): n is a, c, g, or t
  misc_feature (1077)..(1078): n is a, c, g, or t
  misc_feature (1096)..(1096): n is a, c, g, or t
  misc_feature (1098)..(1098): n is a, c, g, or t
  misc_feature (1114)..(1114): n is a, c, g, or t
  misc_feature (1117)..(1117): n is a, c, g, or t
  misc_feature (1135)..(1135): n is a, c, g, or t
  misc_feature (1139)..(1139): n is a, c, g, or t
  misc_feature (1141)..(1141): n is a, c, g, or t
  misc_feature (1145)..(1146): n is a, c, g, or t
  misc_feature (1152)..(1152): n is a, c, g, or t
  misc_feature (1155)..(1157): n is a, c, g, or t
  misc_feature (1159)..(1159): n is a, c, g, or t
  misc_feature (1161)..(1161): n is a, c, g, or t
nnaatagagaaattactatgaagaggatcgcatcaccatcaccatcacggatcctatttaggtgacactatagaatcgtcgacccacgcgtccgcggacgcgtgggcggacgcgtggggcaggtctctgtcgagcagcggacgccggtctctgttccgcaggatggggtttgttaaagttgttaagaataaggcctactttaagagataccaagtgaaatttagaagacgacgagagggtaaaactgattattatgctcggaaacgcttggtgatacaagataaaaataaatacaacacacccaaatacaggatgatagttcgtgtgacaaacagagatatcatttgtcagattgcttatgcccgtatagagggggatatgatagtctgcgcagcgtatgcacacgaactgccaaaatatggtgtgaaggttggcctgacaaattatgctgcagcatattgtactggcctgctgctggcccgcaggcttctcaataggtttggcatggacaagatctatgaaggccaagtggaggtgactggtgatgaatacaatgtggaaagcattgatggtcagccaggtgccttcacctgctatttggatgcaggccttgccagaactaccactggcaataaagtttttggtgccctgaagggagctgtggatggaggcttgtctatccctcacagtaccaaacgattccctggttatgattctgaaagcaaggaatttaatgcagaagtacatcggaagcacatcatgggccagaatgttgcagattacatgcgctacttaatggaagaagatgaagatgcttacaagaaacagttctctcaatacataaagaacagcgtaactccagacatgatgganggagatgtataagaaagctcatgctgctatacgagagaatccagtctatgaaaaagaagccccagaaagaanttaaaaagaagaggtggaanccgtcccnaaatgtcccttgctcaaaagaaggatcgggtagctcaaaanaaggcaagctttcctcaanctcaggagcgggctgcctgaaanctaaaccccnccnattttncnntaattttttcaaattaananaaaaaacttttgaccnccnaaaaaaaaaaaaaggggngccncncccnnaggggngcnnntnanctaata

SEQ ID NO: 336 - DNA, 949 bp, Homo Sapiens
  misc_feature (479)..(479): n is a, c, g, or t
  misc_feature (564)..(564): n is a, c, g, or t
  misc_feature (636)..(636): n is a, c, g, or t
  misc_feature (693)..(693): n is a, c, g, or t
  misc_feature (718)..(718): n is a, c, g, or t
  misc_feature (731)..(731): n is a, c, g, or t
  misc_feature (745)..(745): n is a, c, g, or t
  misc_feature (760)..(760): n is a, c, g, or t
  misc_feature (776)..(776): n is a, c, g, or t
  misc_feature (786)..(786): n is a, c, g, or t
  misc_feature (789)..(789): n is a, c, g, or t
  misc_feature (809)..(809): n is a, c, g, or t
  misc_feature (813)..(813): n is a, c, g, or t
  misc_feature (819)..(819): n is a, c, g, or t
  misc_feature (826)..(826): n is a, c, g, or t
  misc_feature (834)..(834): n is a, c, g, or t
  misc_feature (837)..(837): n is a, c, g, or t
  misc_feature (839)..(839): n is a, c, g, or t
  misc_feature (841)..(842): n is a, c, g, or t
  misc_feature (850)..(850): n is a, c, g, or t
  misc_feature (858)..(858): n is a, c, g, or t
  misc_feature (860)..(861): n is a, c, g, or t
  misc_feature (874)..(874): n is a, c, g, or t
  misc_feature (879)..(879): n is a, c, g, or t
  misc_feature (884)..(885): n is a, c, g, or t
  misc_feature (893)..(893): n is a, c, g, or t
  misc_feature (895)..(895): n is a, c, g, or t
  misc_feature (899)..(899): n is a, c, g, or t
  misc_feature (906)..(906): n is a, c, g, or t
  misc_feature (908)..(908): n is a, c, g, or t
  misc_feature (916)..(916): n is a, c, g, or t
  misc_feature (926)..(926): n is a, c, g, or t
  misc_feature (929)..(929): n is a, c, g, or t
  misc_feature (949)..(949): n is a, c, g, or t
atagagagattactatgagaggatcgcatcaccatcaccatcacggatcctatttaggtgacactatagaatcgtcgacccacgcgtccgcgggagcggagagcggaccccagagagccctgagcagccccaccgccgccgccggcctagttaccatcacaccccgggaggagccgcagctgccgcagccggccccagtcaccatcaccgcaaccatgagcagcgaggccgagacccagcagccgcccgccgccccccccgccgcccccgccctcagcgccgccgacaccaagcccggcactacgggcagcggcgcagggagcggtggcccgggcggcctcacatcggcggcgcctgccggcggggacaagaaggtcatcgcaacgaaggttttgggaacagtaaaatggttcaatgtaaggaacggatatggtttcatcaacaggaatgacaccaaggaagatgtatttgtacaccanactgccataaagaagaataaccccaggaagtaccttcgcagtgtaggagatggagagactgtggagtttgatgttgttgaagganaaaagggtgcggaggcagcaaatgttacaggtcctggtggtgttccagttcaaggcagtaaatatgcagcanaccgtaatcattatagacgctatccacgtcgtaggggtcctccacgcaattaccagnaaaattaccagaatagtgagagtgnggaaaaaaacgangggatcggaaatgnttcccgaaagccagntcaaaaaacgccgggncctatcgcangcnaaagtttcccaccttactanatgnggaaanccctatngggcgtcnacnanannattccaanccttcctntnnaaggaaaaattgntgganggatnntaaacaancnaggnttcctgnanaaaaaggnaaaccagtgnatnaaaaatatttatcggggaan

SEQ ID NO: 337 - DNA, 636 bp, Homo Sapiens
  misc_feature (14)..(14): n is a, c, g, or t
  misc_feature (634)..(636): n is a, c, g, or t
aatagagagattanctatgagaggatcgcatcaccatcaccatcacggatcctatttaggtgacactatagaatcgtcgacccacgcgtccgaccaatctcatgaggagagggaacatgctgagaaactgatgaagctgcagaaccaacgaggtggccgaatcttccttcaggatatcaagaaaccagactgtgatgactgggagagcgggctgaatgcaatggagtgtgcattacatttggaaaaaaatgtgaatcagtcactactggaactgcacaaactggccactgacaaaaatgacccccatttgtgtgacttcattgagacacattacctgaatgagcaggtgaaagccatcaaagaattgggtgaccacgtgaccaacttgcgcaagatgggagcgcccgaatctggcttggcggaatatctctttgacaagcacaccctgggagacagtgataatgaaagctaagcctcgggctaatttccccatagccgtggggtgacttccctggtcaccaaggcagtgcatgcatgttggggtttcctttaccttttctataagttgtaccaaaacatccacttaagttctttgatttgtaccattccttcaaataaagaaatttggtacccnnn

SEQ ID NO: 338 - DNA, 1026 bp, Homo Sapiens
  misc_feature (3)..(3): n is a, c, g, or t
  misc_feature (892)..(892): n is a, c, g, or t
  misc_feature (900)..(900): n is a, c, g, or t
  misc_feature (948)..(948): n is a, c, g, or t
  misc_feature (958)..(958): n is a, c, g, or t
  misc_feature (994)..(994): n is a, c, g, or t
  misc_feature (1004)..(1026): n is a, c, g, or t
atngagaaattactatgagaggatcgcatcaccatcaccatcacggatcctatttaggtgacactatagaatcgtcgacccacgcgtccgcggaccccgcaggagatgggtgcccccatccgcacactgtcctttggccaccggacatcatgcctcccaagaaggatgttcccgtgaagaaaccagcagggccctccatctccaaacctgctgctaagccagcagcagcaggggctcctccagccaagaccaaagctgagccagctgtcccccaggcccctcagaaaacccaggagcctccagtcgatctctccaaagtggtgatcgagtttaacaaggaccagctggaggagttcaaggaggccttcgagctgtttgaccgagtgggggatggcaagatcctgtacagccagtgtggggacgtgatgagggccctgggccagaaccccaccaacgccgaggtgctcaaggtcctggggaaccccaagagtgatgagctgaagtcgcggcgtgtggactttgagactttcctgcccatgctccaggcagtggccaagaaccgaggccaaggcacatatgaggactacttggaggggtttcgtgtgtttgacaaggaggggaacggcaaagtcatgggagcagagctcagacatgttctcaccacccttgcagtactagggtgaaatggaaagcaagaggcatccatgaccaggggaggattcccttgaggactgaggctatgggagaagaagaggtaccactctaaagagcgtggcctggccaggagagaagatgactgaggaggaggtggagaccgttctggcaggacacgaggacagcaacggctgcatcaactacgaggccttcttgaaacacatcctaagcgtctgantgctgcanatccagtggggtccggacactggggccccgcaggcgaaagcacgttcnagccaccagnaggccacctattgtttcaaaataaaaactgggttcntcaaaaaaannnnnnnnnnnnnnnnnnnnnnn

SEQ ID NO: 339 - DNA, 1244 bp, Homo Sapiens
  misc_feature (746)..(746): n is a, c, g, or t
  misc_feature (847)..(847): n is a, c, g, or t
  misc_feature (864)..(864): n is a, c, g, or t
  misc_feature (884)..(884): n is a, c, g, or t
  misc_feature (894)..(894): n is a, c, g, or t
  misc_feature (913)..(913): n is a, c, g, or t
  misc_feature (930)..(930): n is a, c, g, or t
  misc_feature (946)..(946): n is a, c, g, or t
  misc_feature (948)..(948): n is a, c, g, or t
  misc_feature (969)..(969): n is a, c, g, or t
  misc_feature (983)..(983): n is a, c, g, or t
  misc_feature (997)..(997): n is a, c, g, or t
  misc_feature (1000)..(1000): n is a, c, g, or t
  misc_feature (1014)..(1014): n is a, c, g, or t
  misc_feature (1019)..(1019): n is a, c, g, or t
  misc_feature (1028)..(1028): n is a, c, g, or t
  misc_feature (1030)..(1030): n is a, c, g, or t
  misc_feature (1034)..(1034): n is a, c, g, or t
  misc_feature (1037)..(1037): n is a, c, g, or t
  misc_feature (1045)..(1045): n is a, c, g, or t
  misc_feature (1047)..(1047): n is a, c, g, or t
  misc_feature (1050)..(1050): n is a, c, g, or t
  misc_feature (1061)..(1061): n is a, c, g, or t
  misc_feature (1075)..(1075): n is a, c, g, or t
  misc_feature (1080)..(1080): n is a, c, g, or t
  misc_feature (1091)..(1091): n is a, c, g, or t
  misc_feature (1107)..(1107): n is a, c, g, or t
  misc_feature (1109)..(1109): n is a, c, g, or t
  misc_feature (1123)..(1123): n is a, c, g, or t
  misc_feature (1141)..(1141): n is a, c, g, or t
  misc_feature (1144)..(1144): n is a, c, g, or t
  misc_feature (1149)..(1149): n is a, c, g, or t
  misc_feature (1159)..(1160): n is a, c, g, or t
  misc_feature (1162)..(1162): n is a, c, g, or t
  misc_feature (1178)..(1178): n is a, c, g, or t
  misc_feature (1189)..(1189): n is a, c, g, or t
  misc_feature (1195)..(1195): n is a, c, g, or t
  misc_feature (1205)..(1205): n is a, c, g, or t
  misc_feature (1209)..(1209): n is a, c, g, or t
  misc_feature (1214)..(1214): n is a, c, g, or t
  misc_feature (1219)..(1219): n is a, c, g, or t
  misc_feature (1223)..(1223): n is a, c, g, or t
  misc_feature (1233)..(1233): n is a, c, g, or t
  misc_feature (1235)..(1235): n is a, c, g, or t
  misc_feature (1237)..(1237): n is a, c, g, or t
  misc_feature (1240)..(1240): n is a, c, g, or t
agaaattactatgagaggatcgcatcaccatcaccatcacggatcctatttaggtgacactatagaatcgtcgacccacgcgtccgttcctgcctctgccagaacggagggacctgtgaccctgtctcaggccactgtgcgtgcccagagggctgggccggcctggcctgtgagaaggagtgcctcccccgggacgtcagagctggctgccggcacagcggcggttgcctcaacgggggcctgtgtgacccgcacacgggccgctgcctctgcccagccggctggactggggacaagtgtcagagcccctgcctgcggggctggtttggagaggcctgtgcccagcgctgcagctgcccgcctggcgctgcctgccaccacgtcactggggcctgccgctgtccccctggcttcactggctccggctgcgagcagggatgtccgcccgggcggtatgggccaggctgtgaacagctgtgtgggtgtctcaacgggggctcctgtgatgcggccacgggggcctgccgctgccccactgggttcctcgggacggactgcaacctcacctgtccgcagggccgcttcggccccaactgcacccacgtgtgtgggtgtgggcagggggcggcctgcgaccctgtgaccggcacctgcctctgccccccggggagagccggcgtccgctgtgagcgaggctgcccccagaaccggtttggcgtgggctgcgagcacacctgctcctgcanaaatgggggcctgtgccacgccagcaacggcagctgctcctgtggcctgggctggacggggcggcactgcgagctggcctgtccccctgggcgctacgganccgcctgcaatctggantgctcctgccacaacaacancacgtgtgancctgcaacgggcacctgcngctgcggccccggcttntatggcaaggcctgcnancaccctgtcccctggcttcanggggctgctgccanggttttgctgttgnaanatgaaccccctgcnacccnataatggcnangctntgncctgcggntncanggcaatttggnaaaagggttgaacnagttnatttgaaaagnttccccaaccctttantntaaaggggggcacntggaacctttaacggttnttnctttnccccaagggnntnaaaaaccttttaactntaattaaaaanggccantttggccccnttcnccccnatttnaatncggggggggntnanatnaacc

SEQ ID NO: 340 - DNA, 1136 bp, Homo Sapiens
  misc_feature (2)..(2): n is a, c, g, or t
  misc_feature (929)..(929): n is a, c, g, or t
  misc_feature (941)..(941): n is a, c, g, or t
  misc_feature (954)..(954): n is a, c, g, or t
  misc_feature (959)..(959): n is a, c, g, or t
  misc_feature (964)..(964): n is a, c, g, or t
  misc_feature (966)..(966): n is a, c, g, or t
  misc_feature (968)..(968): n is a, c, g, or t
  misc_feature (971)..(971): n is a, c, g, or t
  misc_feature (987)..(987): n is a, c, g, or t
  misc_feature (1002)..(1002): n is a, c, g, or t
  misc_feature (1024)..(1024): n is a, c, g, or t
  misc_feature (1026)..(1028): n is a, c, g, or t
  misc_feature (1050)..(1050): n is a, c, g, or t
  misc_feature (1054)..(1054): n is a, c, g, or t
  misc_feature (1058)..(1058): n is a, c, g, or t
  misc_feature (1060)..(1060): n is a, c, g, or t
  misc_feature (1074)..(1074): n is a, c, g, or t
  misc_feature (1085)..(1085): n is a, c, g, or t
  misc_feature (1096)..(1096): n is a, c, g, or t
  misc_feature (1101)..(1101): n is a, c, g, or t
  misc_feature (1110)..(1110): n is a, c, g, or t
  misc_feature (1113)..(1113): n is a, c, g, or t
  misc_feature (1116)..(1116): n is a, c, g, or t
  misc_feature (1120)..(1120): n is a, c, g, or t
  misc_feature (1125)..(1125): n is a, c, g, or t
  misc_feature (1128)..(1129): n is a, c, g, or t
  misc_feature (1131)..(1131): n is a, c, g, or t
  misc_feature (1136)..(1136): n is a, c, g, or t
antagagaaattactatgagaggatcgcatcaccatcaccatcacggatcctatttaggtgacactatagaatcgtcgacccacgcgtccgtgggttctcccgattatggcaactcagccctgctcagcttgcctggctaccgccccaccactcgcagttctgctcgtcgttcccaggccggggtgtccagtggggcccctccaggaaggaacagcttctacatgggcacttgccaggatgagcctgagcagctggatgactggaaccgcattgcagagctgcagcagcgcaatcgagtgtgccccccacatctgaagacctgctatcccctggagtccaggccttccctgagcctgggcaccatcacagatgaggagatgaaaactggagacccccaagagaccctgcgccgagccagcatgcagccaatccagatagccgagggcactggcatcaccacccggcagcagcgcaaacgggtctccctagagccccaccagggccctggaactcctgagtctaagaaggccaccagctgtttcccacgccccatgactccccgagaccgacatgaagggcgcaaacagagcactactgaggcccagaagaaagcagctccagcttctactaaacaggctgaccggcgccagtcgatggccttcagcatcctcaacacacccaagaagctagggaacagccttctgcggcggggagcctcaaagaaggccctgtccaaggcttcccccaacactcgcagtggaacccgccgttctccgcgcattgccaccaccacagccagcgccgccactgctgccgccattggtgccacccctcgagccaagggcaaggcaaaagcactaaagggccagtaccagtgagtggccccacctgtgtccccgatgctgccgtcacctggtcctccgcctantgtccctctcantgccttctctcanctccnagccnanantanccaaacccctaaaaanagtgatgcctgcccncaccctggcctggtcctggtcntnnntgggccttttcgaactggccangggnctgnanatgaaaggggggcnctctcctactngcccctttttntaaanaaatccttntcntcnaacnaattnagnngntttan

SEQ ID NO: 341 - DNA, 835 bp, Homo Sapiens
  misc_feature (19)..(19): n is a, c, g, or t
  misc_feature (319)..(319): n is a, c, g, or t
  misc_feature (389)..(389): n is a, c, g, or t
  misc_feature (477)..(477): n is a, c, g, or t
  misc_feature (651)..(651): n is a, c, g, or t
  misc_feature (693)..(693): n is a, c, g, or t
  misc_feature (702)..(702): n is a, c, g, or t
  misc_feature (717)..(717): n is a, c, g, or t
  misc_feature (727)..(727): n is a, c, g, or t
  misc_feature (756)..(756): n is a, c, g, or t
  misc_feature (763)..(763): n is a, c, g, or t
  misc_feature (787)..(787): n is a, c, g, or t
  misc_feature (793)..(794): n is a, c, g, or t
  misc_feature (796)..(797): n is a, c, g, or t
  misc_feature (803)..(804): n is a, c, g, or t
  misc_feature (807)..(807): n is a, c, g, or t
  misc_feature (811)..(811): n is a, c, g, or t
  misc_feature (814)..(814): n is a, c, g, or t
  misc_feature (819)..(819): n is a, c, g, or t
  misc_feature (824)..(824): n is a, c, g, or t
  misc_feature (833)..(833): n is a, c, g, or t
tagagaaaattaactatgnagaggatcgcatcaccattcaccattcacggaatcctatttaggtgacactatagaatcgttcgacccacgcgttccgttcctcattcctcctcctcctccttggcatccgcctcttcttcctcctgcgtcctcccccgctgcctccgctgctcccgacgcggagcccggagcccgcgccgagcccctggcctcgcggtgccatgctgccccggcggcggcgctgaaggatggcgacgccgctgcctccgccctccccgcggcacctgcggctgctgcggctgctgctctccggcctcgncctcggcgccgccctgcgtggagccgccgccggccacccggatgtagccgcctgtcccgggagcctggantgtgccctgaagaggcgggcaaggtgtcctcctggtgcacatgcctgtgggccctgccttcagcccttccaggaggaccagcaagggntctgtgtgcccaggatgcgccggcctccaagcgggggccggccccagcccagactggaagatgagattgacttcctggcccaggagcttgcccggaaggagtctggacacccaactccgcccctacccaaggaccgacagcggctcccggaacctgccaccctgggcttctcgncacgggggcaggggctggagctgggcctcccctccactccangaacccccnaagcccacgccccanacctccctgngctcccctgtgtcatccgacccggtgcanatgttcnccccttggaaccccggggaagggnaaaggnnannggctcnnccnttgnggntgatnctggngttttgtgngg

SEQ ID NO: 342 - DNA, 1076 bp, Homo Sapiens
  misc_feature (853)..(853): n is a, c, g, or t
  misc_feature (859)..(859): n is a, c, g, or t
  misc_feature (886)..(886): n is a, c, g, or t
  misc_feature (908)..(908): n is a, c, g, or t
  misc_feature (920)..(920): n is a, c, g, or t
  misc_feature (945)..(945): n is a, c, g, or t
  misc_feature (948)..(948): n is a, c, g, or t
  misc_feature (954)..(954): n is a, c, g, or t
  misc_feature (956)..(956): n is a, c, g, or t
  misc_feature (959)..(959): n is a, c, g, or t
  misc_feature (964)..(964): n is a, c, g, or t
  misc_feature (969)..(969): n is a, c, g, or t
  misc_feature (1001)..(1001): n is a, c, g, or t
  misc_feature (1006)..(1006): n is a, c, g, or t
  misc_feature (1015)..(1016): n is a, c, g, or t
  misc_feature (1019)..(1019): n is a, c, g, or t
  misc_feature (1023)..(1024): n is a, c, g, or t
  misc_feature (1036)..(1037): n is a, c, g, or t
  misc_feature (1041)..(1041): n is a, c, g, or t
  misc_feature (1044)..(1044): n is a, c, g, or t
  misc_feature (1062)..(1062): n is a, c, g, or t
  misc_feature (1066)..(1066): n is a, c, g, or t
aatagagaaattactatgagaggatcgcatcaccatcaccatcacggatcctatttaggtgacactatagaatcgtcgacccacgcgtccggcgacgccctccattcactctccgcgcccgttctccggctgtcctcccgttccgctgcccgccctgccaccatgacggaacaggccatctccttcgccaaagacttcttggccggaggcatcgccgccgccatctccaagacggccgtggctccgatcgagcgggtcaagctgctgctgcaggtccagcacgccagcaagcagatcgccgccgacaagcagtacaagggcatcgtggactgcattgtccgcatccccaaggagcagggcgtgctgtccttctggaggggcaaccttgccaacgtcattcgctacttccccactcaagccctcaacttcgccttcaaggataagtacaagcagatcttcctggggggcgtggacaagcacacgcagttctggaggtactttgcgggcaacctggcctccggcggtgcggccggcgcgacctccctctgcttcgtgtacccgctggatttcgccagaacccgcctggcagcggacgtgggaaagtcaggcacagagcgcgagttccgaggcctgggagactgcctggtgaagatcaccaagtccgacggcatccggggcctgtaccagggcttcagtgtctccgtgcagggcatcatcatctaccgggcggcctacttcggcgtgtacgatacggccaagggcatgctccccgaccccaagaacacgcacatcgtggtgagctggatgatcgcgcaaaccgtgacggccgtggccggcgtggtgtcctaccccnttcganacggtgcggcggcgcatgatgatgcantccgggcgcaaaagaaactganatcatgtacacngggcaccgtcgaatgttggaagaanatnttaaananganggggnaaggncttcttcaagggtgcgtggtccaacgtcctgnggggnatggggggnnccnttcnnggctggtcctgnnaaanaanttcaaaaaggggattaangggncgggggcttc

SEQ ID NO: 343 - DNA, 862 bp, Homo Sapiens
tgagaggatcgcatcaccatcaccatcacggatcctatttaggtgacactatagaatcgtcgacccacgcgtccgcccacgcgtccgcccacgcgtccgggagtgcaggttcgggggtggaatccttgggccgctgggcaagcggcgagacctggccagggccagcgagccgaggacagagggccgcttgcagaccccgccatggacccgttcctggtgctgctgcactcggtgtcgtccagcctgtcgagcagcgagctgaccgagctcaagttcctatgcctcgggcgcgtgggcaagcgcaagctggagcgcgtgcagagcggcctagacctcttctccatgctgctggagcagaacgacctggagcccgggcacaccgagctcctgcgcgagctgctcgcctccctgcggcgccacgacctgctgcggcgcgtcgacgacttcgaggcgggggcggcggccggggccgcgcctggggaagaagacctgtgtgcagcatttaacgtcatatgtgataatgtggggaaagattggagaaggctggctcgtcagctcaaagtctcagacaccaagatcgacagcatcgaggacagatacccccgcaacctgacagagcgtgtgcgggagtcactgagaatctggaagaacacagagaaggagaacgcaacagtggcccacctggtgggggctctcaggtcctgccagatgaacctggtggctgacctggtacaagaggttcagcaggcccgtgacctccagaacaggagtggggccatgtccccgatgtcatggaactcagacgcatctacctccgaagcgtcctgatgggccgctgctttgcgctggtggaccacaggca

SEQ ID NO: 344 - DNA, 1247 bp, Homo Sapiens
  misc_feature (744)..(744): n is a, c, g, or t
  misc_feature (888)..(888): n is a, c, g, or t
  misc_feature (985)..(985): n is a, c, g, or t
  misc_feature (1001)..(1001): n is a, c, g, or t
  misc_feature (1006)..(1006): n is a, c, g, or t
  misc_feature (1017)..(1017): n is a, c, g, or t
  misc_feature (1020)..(1020): n is a, c, g, or t
  misc_feature (1032)..(1032): n is a, c, g, or t
  misc_feature (1041)..(1041): n is a, c, g, or t
  misc_feature (1071)..(1071): n is a, c, g, or t
  misc_feature (1074)..(1074): n is a, c, g, or t
  misc_feature (1076)..(1076): n is a, c, g, or t
  misc_feature (1081)..(1081): n is a, c, g, or t
  misc_feature (1087)..(1087): n is a, c, g, or t
  misc_feature (1100)..(1100): n is a, c, g, or t
  misc_feature (1104)..(1104): n is a, c, g, or t
  misc_feature (1126)..(1126): n is a, c, g, or t
  misc_feature (1128)..(1128): n is a, c, g, or t
  misc_feature (1135)..(1135): n is a, c, g, or t
  misc_feature (1139)..(1139): n is a, c, g, or t
  misc_feature (1162)..(1162): n is a, c, g, or t
  misc_feature (1167)..(1167): n is a, c, g, or t
  misc_feature (1170)..(1170): n is a, c, g, or t
  misc_feature (1173)..(1173): n is a, c, g, or t
  misc_feature (1184)..(1184): n is a, c, g, or t
  misc_feature (1191)..(1191): n is a, c, g, or t
  misc_feature (1193)..(1193): n is a, c, g, or t
  misc_feature (1211)..(1211): n is a, c, g, or t
  misc_feature (1215)..(1215): n is a, c, g, or t
  misc_feature (1221)..(1221): n is a, c, g, or t
  misc_feature (1229)..(1229): n is a, c, g, or t
  misc_feature (1246)..(1247): n is a, c, g, or t
tagagaaattactatgagaggatcgcatcaccatcaccatcacggatcctatttaggtgacactatagaatcgtcgacccacgcgtccgcccacgcgtccgggcggcgggatggaggcggcggccgagcctggaaacctggccggcgtcaggcacatcatcctggtcctctcaggaaaggggggcgttgggaaaagcaccatctccacggagctggccctggcactgcgccatgcaggcaagaaggtgggaatcctggatgtggacctgtgtggccccagtatcccccgcatgctcggggcgcagggcagggctgtgcaccagtgcgaccgcggctgggcacccgtcttcctggaccgggagcagagcatctcgctcatgtctgtgggcttcctgctggagaagccggacgaggccgtggtgtggagaggccccaagaaaaacgcgctgataaagcagtttgtgtccgacgtggcctggggggagctggactacctggtggtggacacgcccccggggacctccgatgagcacatggccaccatagaagccctgcgtccctaccagcccctgggggccctcgtggtcaccacgccccaggcggtgtccgtgggggacgtgaggcgcgagctgaccttctgtaggaagacgggcttgcgggtgatgggaatcgtggagaatatgagcggcttcacctgcccacactgcacggagtgcaccagcgtcttctccaggggcggcgganaggagctggcccagctcgccggggtgcccttcttaagctccgtgcccctggaaccctgcgctcatgaggaccctggaggaagggccacgacttcatccaggaagttccccgggagccccgccttcgctgcactcacctccatancccaaaaaattctggacgcgacgcccgcgtgcctccccttgactaaaggccaccttgcagccgcttttccaggcccaccaaggggctctgcttccanccttttcaaaaaaaanaaaangcctggggctncgntttccggggccntgcaggggncaggcccaagccaacgttcacgggaaaaanttntnccccnaacaancccaaccccaaanaatnttttccacccaacaaccttttncnttggttnggcntgcaaaggcccggggtttttgcntgctnttnccnccttttaaaanggggggngnccttgggcttttttcccnatcnaggttncccaaccngggcccccgggaacccnn

SEQ ID NO: 345 - DNA, 1035 bp, Homo Sapiens
  misc_feature (911)..(911): n is a, c, g, or t
  misc_feature (916)..(916): n is a, c, g, or t
  misc_feature (923)..(923): n is a, c, g, or t
  misc_feature (944)..(944): n is a, c, g, or t
  misc_feature (947)..(947): n is a, c, g, or t
  misc_feature (956)..(956): n is a, c, g, or t
  misc_feature (963)..(963): n is a, c, g, or t
  misc_feature (998)..(999): n is a, c, g, or t
  misc_feature (1001)..(1001): n is a, c, g, or t
  misc_feature (1003)..(1003): n is a, c, g, or t
  misc_feature (1009)..(1009): n is a, c, g, or t
  misc_feature (1014)..(1014): n is a, c, g, or t
  misc_feature (1020)..(1020): n is a, c, g, or t
  misc_feature (1026)..(1027): n is a, c, g, or t
  misc_feature (1029)..(1029): n is a, c, g, or t
  misc_feature (1033)..(1033): n is a, c, g, or t
tagagaaattactatgagaggatcgcatcaccatcaccatcacggatcctatttaggtgacactatagaatcgtcgacccacgcgtccggatcccgccggaagcgccaggacaatggggacccgggacgacgagtacgactacctattcaaagtggtgctcatcggggactcaggcgtgggcaagagcaacctgctgtcgcgcttcacccgcaacgagttcaacctggagagcaagagcaccatcggcgtggagttcgccacccgcagcatccaggtggacggcaagaccatcaaggcgcagatctgggacaccgctggccaggagcgctaccgcgccatcacctccgcgtactaccgtggtgcagtgggcgccctgctggtgtacgacatcgccaagcacctgacctatgagaacgtggagcgctggctgaaggagctgcgggaccacgcagacagcaacatcgtcatcatgctggtgggcaacaagagtgacctgcgccacctgcgggctgtgcccactgacgaggcccgcgccttcgcagaaaagaacaacttgtccttcatcgagacctcagccttggattccactaacgtagaggaagcattcaagaacatcctcacagagatctaccgcatcgtgtcacagaaacagatcgcagaccgcgctgcccacgacgagtccccggggaacaacgtggtggacatcagcgtgccgcccaccacggacggacagaagcccaacaagctgcagtgctgccagaacctgtgacccctgcgcctccacccagcgtgcgtgcacgtcctccgcccgcccccgccacggtatcctctggcccctccctgctgtccctctgtggccggctcgttccagccctcccagtgagctctgcacggccgggccggggcccangaagnacaggancccagtgctaccccgtcctgnccngggaaaaanctaaaanccccggtttgctgcacccatgaaactcgggtcccnnancntcttgncgggntggggnaggccnnanaatnaa

SEQ ID NO: 346 - DNA, 1099 bp, Homo Sapiens
  misc_feature (880)..(880): n is a, c, g, or t
  misc_feature (913)..(913): n is a, c, g, or t
  misc_feature (947)..(947): n is a, c, g, or t
  misc_feature (962)..(962): n is a, c, g, or t
  misc_feature (974)..(974): n is a, c, g, or t
  misc_feature (989)..(989): n is a, c, g, or t
  misc_feature (994)..(994): n is a, c, g, or t
  misc_feature (999)..(999): n is a, c, g, or t
  misc_feature (1002)..(1003): n is a, c, g, or t
  misc_feature (1011)..(1011): n is a, c, g, or t
  misc_feature (1046)..(1046): n is a, c, g, or t
  misc_feature (1073)..(1073): n is a, c, g, or t
  misc_feature (1075)..(1075): n is a, c, g, or t
  misc_feature (1077)..(1077): n is a, c, g, or t
  misc_feature (1082)..(1086): n is a, c, g, or t
  misc_feature (1088)..(1088): n is a, c, g, or t
  misc_feature (1097)..(1097): n is a, c, g, or t
tagagaaattactatgagaggatcgcatcaccatcaccatcacggatcctatttaggtgacactatagaatcgtcgacccacgcgtccgggctcatccaaaatagaggaagcatgcgaaatctacgccagagcagcaaacatgttcaaaatggccaaaaactggagtgctgctggaaacgcgttctgccaggctgcacagctgcacctgcagctccagagcaagcacgacgcagccacctgctttgtggacgctggcaacgcattcaagaaagccgacccccaagaggccattaactgtttgatgcgagcaatcgagatctacacagacatgggccgattcacgattgcggccaagcaccacatctccattgctgagatctatgagacagagttggtggacatcgagaaggccattgcccactacgagcagtctgcagactactacaaaggcgaggagtccaacagctcagccaacaagtgtctgctgaaggtggctggttacgctgcgctgctggagcagtatcagaaggccattgacatctacgaacaggtggggaccaatgccatggacagccccctcctcaagtacagcgccaaagactacttcttcaaggcggccctctgccacttctgcatcgacatgctcaacgccaagctggctgtccaaaagtatgaggagctgttcccagctttctctgattcccgggaatgcaagttgatgaaaaaattgctagaggcccacgaggagcagaatgtggacagctacaccgagtcggtgaaggaatacgactccatctcccggctggaccagtggctcaccaccatgctgctgcgcatcaagaagaccatccagggcgatgaggaggacctgcgctaaanccccacccagcccccccagtggcccgtctttcntgtcccatctgctcaaaaaagaaggtgggggccnaaaacttgctggaanagcttccctccnttcccatctggggantgccncgggnccnnattgggcnaggggcacccggggtcaacatgcaagggcccccanaagcccaggctgctggccggaaatccncntnttttnnnnnanattccttgncc

SEQ ID NO: 347 - DNA, 866 bp, Homo Sapiens
  misc_feature (4)..(4): n is a, c, g, or t
aatngagaaattactatgagaggatcgcatcaccatcaccatcacggatcctatttaggtgacactatagaatcgtcgacccacgcgtccgctggcggtgaacatggtgcccttccctcgcctgcacttcttcatgcccggcttcgcgcccctgaccagccggggcagccagcagtaccgggcgctcacggtgcccgagctcacccagcagatgttcgactccaagaacatgatggccgcctgcgacccgcgccacggccgctacctgacggtggctgccatcttccggggccgcatgtccatgaaggaggtggacgagcagatgctcaacgtgcagaacaagaacagcagctacttcgtggagtggatccccaacaacgtgaagacggccgtgtgcgacatcccgccccgcggcctgaagatgtcggccaccttcatcggcaacagcacggccatccaggagctgttcaagcgcatctccgagcagttcacggccatgttccggcgcaaggccttcctgcactggtacacgggcgagggcatggacgagatggagttcaccgaggccgagagcaacatgaacgacctggtgtccgagtaccagcagtaccaggacgccacggccgacgaacaaggggagttcgaggaggaggagggcgaggacgaggcttaaaaacttctcagatcaatcgtgcatccttagtgaacttctgttgtcctcaagcatggtctttctacttgtaaactatggtgctcagttttgcctctgttagaaattcacactgttgatgtaatgatgtggaactcctctaaaaattacagtattgtctgtgaaggtatctatactaataaaaaagcatgtgtag

SEQ ID NO: 348 - DNA, 888 bp, Homo Sapiens
  misc_feature (2)..(4): n is a, c, g, or t
  misc_feature (7)..(15): n is a, c, g, or t
  misc_feature (17)..(17): n is a, c, g, or t
  misc_feature (19)..(23): n is a, c, g, or t
  misc_feature (767)..(767): n is a, c, g, or t
  misc_feature (779)..(780): n is a, c, g, or t
  misc_feature (782)..(782): n is a, c, g, or t
  misc_feature (793)..(793): n is a, c, g, or t
  misc_feature (800)..(800): n is a, c, g, or t
  misc_feature (815)..(815): n is a, c, g, or t
  misc_feature (820)..(821): n is a, c, g, or t
  misc_feature (829)..(829): n is a, c, g, or t
  misc_feature (838)..(838): n is a, c, g, or t
  misc_feature (847)..(847): n is a, c, g, or t
  misc_feature (851)..(851): n is a, c, g, or t
  misc_feature (855)..(855): n is a, c, g, or t
  misc_feature (864)..(864): n is a, c, g, or t
  misc_feature (868)..(868): n is a, c, g, or t
  misc_feature (876)..(877): n is a, c, g, or t
  misc_feature (880)..(880): n is a, c, g, or t
annnaannnnnnnnncntnnnnntcccatcacggatcctatttaggtgacactatagaatcgtcgacccacgcgtccggctctcagctggctcttgtctcgcccttttgttttatttcggaggcttgcagtttagggcatcgaggagccacagccggagagaagaacacagcggtaggaatggcttgcaccaccccagtccggatcatttctggccccgcttcccggacgctctgcgccccttcgttccttgggatcaattggaaaacgaggattccagcgtgcacatttccccccggcagaagcgagatgccaactccagcatctacaaaggcaagaagtgccgcatggagtcctgcttcgatttcaccctttgcaagaaaaacggcttcaaagtctacgtatacccacagcaaaaaggggagaaaatcgccgaaagttaccaaaacattctagcggccatcgagggctccaggttctacacctcggaccccagccaggcgtgcctctttgtcctgagtctggatactttagacagagaccagttgtcacctcagtatgtgcacaatttgagatccaaagtgcagagtctccacttgtggaacaatggtaggaatcatttaatttttaatttatattccggcacttggcctgactacaccgaggacgtggggtttgacatcggccaggcgatgctggccaaagccagcatcagtactgaaaaacttccgacccaactttgatgtttctattcccctcttttctaangatcatccccannanaggaagggganagggggntttttgaagttcaanaccannccttcctntcaggaaanaacatgctnggtnttcnaggggaaanaagntacttgannggnaaaggatc

SEQ ID NO: 349 - DNA, 853 bp, Homo Sapiens
  misc_feature (695)..(695): n is a, c, g, or t
  misc_feature (805)..(805): n is a, c, g, or t
  misc_feature (816)..(816): n is a, c, g, or t
  misc_feature (830)..(830): n is a, c, g, or t
  misc_feature (834)..(834): n is a, c, g, or t
  misc_feature (846)..(846): n is a, c, g, or t
taagaggagaattaactatgagaggatcgcatcaccatcaccatcacggatcctatttaggtgacactatagaatcgtcgacccacgcgtccgcttacattaagaaaattggctacaaccccgacacagtagcatttgtgccaatttctggttggaatggtgacaacatgctggagccaagtgctaacatgccttggttcaagggatggaaagtcacccgtaaggatggcaatgccagtggaaccacgctgcttgaggctctggactgcatcctaccaccaactcgtccaactgacaagcccttgcgcctgcctctccaggatgtctacaaaattggtggtattggtactgttcctgttggccgagtggagactggtgttctcaaacccggtatggtggtcacctttgctccagtcaacgttacaacggaagtaaaatctgtcgaaatgcaccatgaagctttgagtgaagctcttcctggggacaatgtgggcttcaatgtcaagaatgtgtctgtcaaggatgttcgtcgtggcaacgttgctggtgacagcaaaaatgacccaccaatggaagcagctggcttcactgctcaggtgattatcctgaaccatccaggccaaataagcgccggctatgcccctgtattggattgccacacggctcacattgcatgcaagtttgctgagctgaangaaaagattgatcgccgttctggtaaaaaagctggaagatggcccaaaattcttgaagtctggggatgctgccattgttgattggttcctggcaacccatgggtgttganacttctcaaanatccacctttgggncccnttgctgttcggnaaagaaa

SEQ ID NO: 350 - DNA, 1159 bp, Homo Sapiens
  misc_feature (750)..(750): n is a, c, g, or t
  misc_feature (794)..(794): n is a, c, g, or t
  misc_feature (824)..(824): n is a, c, g, or t
  misc_feature (827)..(827): n is a, c, g, or t
  misc_feature (861)..(861): n is a, c, g, or t
  misc_feature (864)..(864): n is a, c, g, or t
  misc_feature (883)..(883): n is a, c, g, or t
  misc_feature (907)..(907): n is a, c, g, or t
  misc_feature (912)..(912): n is a, c, g, or t
  misc_feature (919)..(919): n is a, c, g, or t
  misc_feature (922)..(922): n is a, c, g, or t
  misc_feature (925)..(925): n is a, c, g, or t
  misc_feature (940)..(940): n is a, c, g, or t
  misc_feature (944)..(944): n is a, c, g, or t
  misc_feature (954)..(954): n is a, c, g, or t
  misc_feature (962)..(962): n is a, c, g, or t
  misc_feature (971)..(971): n is a, c, g, or t
  misc_feature (975)..(975): n is a, c, g, or t
  misc_feature (982)..(982): n is a, c, g, or t
  misc_feature (1003)..(1003): n is a, c, g, or t
  misc_feature (1017)..(1017): n is a, c, g, or t
  misc_feature (1023)..(1023): n is a, c, g, or t
  misc_feature (1028)..(1028): n is a, c, g, or t
  misc_feature (1030)..(1030): n is a, c, g, or t
  misc_feature (1039)..(1039): n is a, c, g, or t
  misc_feature (1045)..(1045): n is a, c, g, or t
  misc_feature (1050)..(1050): n is a, c, g, or t
  misc_feature (1053)..(1053): n is a, c, g, or t
  misc_feature (1061)..(1061): n is a, c, g, or t
  misc_feature (1065)..(1065): n is a, c, g, or t
  misc_feature (1075)..(1075): n is a, c, g, or t
  misc_feature (1083)..(1083): n is a, c, g, or t
  misc_feature (1091)..(1091): n is a, c, g, or t
  misc_feature (1098)..(1098): n is a, c, g, or t
  misc_feature (1102)..(1104): n is a, c, g, or t
  misc_feature (1106)..(1106): n is a, c, g, or t
  misc_feature (1111)..(1111): n is a, c, g, or t
  misc_feature (1137)..(1139): n is a, c, g, or t
  misc_feature (1144)..(1144): n is a, c, g, or t
  misc_feature (1147)..(1147): n is a, c, g, or t
  misc_feature (1149)..(1149): n is a, c, g, or t
  misc_feature (1159)..(1159): n is a, c, g, or t
gattagagaaattactatgagaggatcgcatcaccatcaccatcacggatcctatttaggtgacactatagaatcgtcgacccacgcgtccgcgggacaagtcgccggcggcgcccgacggagcagaagagagagcatggagctggagaggatcgtcagtgcagccctccttgcctttgtccagacacacctcccggaggccgacctcagtggcttggatgaggtcatcttctcctatgtgcttggggtcctggaggacctgggcccctcgggcccatcagaggagaacttcgatatggaggctttcactgagatgatggaggcctatgtgcctggcttcgcccacatccccaggggcacaataggggacatgatgcagaagctctcagggcagctgagcgatgccaggaacaaagagaacctgcaaccgcagagctctggtgtccaaggtcaggtgcccatctccccagagcccctgcagcggcccgaaatgctcaaagaagagactaggtcttcggctgctgctgctgcagacacccaagatgaggcaactggcgctgaggaggagcttctgccaggggtggatgtactcctggaggtgttccctacctgttcggtggagcaggcccagtgggtgctggccaaagctcggggggacttggaagaagctgtgcagatgctggtagagggaaaggaagaggggcctgcagcctgggagggccccaaccaggacctgcccagacgcctcanaggcccccaaaaaggatgagctgaagtccttcatcctgcaaaantacatgatggtggatagcgcaaaagatcanaanattcaccggcccatggctcccaaaggaggccccnaanaagctgatccgatacatcnacaaccaggtagtgagcaccaaangggancgattcnaanatntgcggaaccctgagnccangaaatgaagncccatacntcacctcanccanccaaaantacccttccattgaggcctcnccggaatttgcccnaacttntaggntnaattccaanggatgnagganccnttttcccntaanaggggccccnaaatccgntccccttnctaatcntttnnncnaaagntaaccaatcccgaactgccccttggnnnataanggngnccaggggggn

SEQ ID NO: 351 - DNA, 730 bp, Homo Sapiens
  misc_feature (14)..(14): n is a, c, g, or t
  misc_feature (697)..(697): n is a, c, g, or t
  misc_feature (707)..(709): n is a, c, g, or t
  misc_feature (711)..(730): n is a, c, g, or t
aatagagagattanctatgagaggatcgcatcaccatcaccatcacggatcctatttaggtgacactatagaatcgtcgacccacgcgtccggtggttcccaaagatgtcaatgctgccattgccaccatcaagaccaagcgtaccatccagtttgtggattggtgccccactggcttcaaggttggcatcaactaccagcctcccactgtggtgcctggtggagacctggccaaggtacagagagctgtgtgcatgctgagcaacaccacagccattgctgaggcctgggctcgcctggaccacaagtttgacctgatgtatgccaaacgtgcctttgttcactggtacgttggggaggggatggaggaaggtgagttttcagaggcccgtgaggacatggctgcccttgagaaggattatgaggaggttggtgtggattctgttgaaggagagggtgaggaagaaggagaggaatactaaagttaaaacgtcacaaaggtgctgcttttacagggaagcttattctgttttaaacattgaaaagttgtggtctgatcagttaatttgtatgtagcagtgtatgctctcatatacaattactgacctatgctctaaaacatgaatgctttgttacagacccaagctgtccatttctgtgatgggttttgaataaagtattccctgtcttaaatganaaaaaaaaannnannnnnnnnnnnnnnnnnnnn

SEQ ID NO: 352 - DNA, 934 bp, Homo Sapiens
  misc_feature (2)..(2): n is a, c, g, or t
  misc_feature (4)..(4): n is a, c, g, or t
  misc_feature (777)..(777): n is a, c, g, or t
  misc_feature (781)..(781): n is a, c, g, or t
  misc_feature (801)..(801): n is a, c, g, or t
  misc_feature (803)..(803): n is a, c, g, or t
  misc_feature (806)..(806): n is a, c, g, or t
  misc_feature (829)..(829): n is a, c, g, or t
  misc_feature (834)..(834): n is a, c, g, or t
  misc_feature (839)..(840): n is a, c, g, or t
  misc_feature (845)..(845): n is a, c, g, or t
  misc_feature (848)..(848): n is a, c, g, or t
  misc_feature (851)..(851): n is a, c, g, or t
  misc_feature (854)..(855): n is a, c, g, or t
  misc_feature (857)..(858): n is a, c, g, or t
  misc_feature (861)..(861): n is a, c, g, or t
  misc_feature (877)..(877): n is a, c, g, or t
  misc_feature (882)..(882): n is a, c, g, or t
  misc_feature (898)..(898): n is a, c, g, or t
  misc_feature (903)..(903): n is a, c, g, or t
  misc_feature (911)..(911): n is a, c, g, or t
  misc_feature (913)..(913): n is a, c, g, or t
  misc_feature (932)..(932): n is a, c, g, or t
anantagagaaattactatgagaggatcgcatcaccatcaccatcacggatcctatttaggtgacactatagaatcgtcgacccacgcgtccgcgtggccccggtcgcgtctgccttggagaagaagacaaagagcaaggggccctacatctgcgctctgtgcgccaaggagttcaagaacggctacaatctccggaggcacgaagccatccacacgggagccaaggccggccgggtcccctcgggtgctatgaagatgccgaccatggtgcccctgagcctcctgagcgtgccccagctgagcggagccggcgggggagggggagaggcgggtgccggcggcggcgctgccgcagtggccgccggtggcgtggtgaccacgaccgcctcggggaagcgcatccggaagaaccatgcctgcgagatgtgtggcaaggccttccgcgacgtctaccacctgaaccgacacaagctgtcgcactcggacgagaagccctaccagtgcccggtgtgccagcagcgcttcaagcgcaaggaccgcatgagctaccacgtgcgctcacatgacggcgctgtgcacaagccctacaactgctcccactgtggcaagagcttctcccggtgtgcacggggcctcggccgcccgctaggccgtggggagggagggacgcgacggaggtggcctggccgtggctggcggggagggaggcggctgctgaggctggggaaggggagccactcccagggcggagggaggaagcctctcccggttaccanggancaaggggtggtcctttgtcnangangtgggccttggggttgacggaancttcncgtgnnaagangcngcngcnncnncancgctgctgggctccanggganggatttcctgcttaantgtcnctgtgacngnctgggctccggaagaagcnca

SEQ ID NO: 353 - DNA, 1350 bp, Homo Sapiens
atggagtttttcatcagtatgtctgaaaccattaaatataatgacgatgatcataaaactctgtttctgaaaacactaaatgaacaacgcctggaaggagaattttgtgatattgctattgtggttgaggatgtgaaattcagagcacacagatgtgttcttgctgcctgcagcacttactttaaaaagcttttcaagaagcttgaggttgatagttcttcggtcatagaaatagattttcttcgttctgatatatttgaagaggtcctgaactacatgtacacagcaaagatttccgtgaaaaaagaagatgttaacttaatgatgtcatcgggtcagattcttggtatccgatttttggataaactgtgttctcagaagcgtgatgtgtccagtcccgatgaaaacaatggtcagtccaaaagtaagtattgccttaaaataaatcgccccattggagatgctgctgacacccaggatgatgatgtagaggaaatcggggatcaggatgacagtccttctgatgacacagtagaaggcacacccccgagtcaggaggacggcaagtcgcccaccacaacgctcagggttcaggaagcgatcctgaaagagctggggagtgaggaagttcggaaggtcaattgctacggccaggaagtagaatccatggagaccccagaatcaaaagacttggggtcccagacccctcaagccttaacatttaatgatgggatgagtgaagtgaaagatgaacagacaccaggctggacaacagccgccagtgacatgaagtttgagtatttgctttatggtcaccatcgggagcagattgcctgccaggcgtgtgggaagacgttttctgatgaaggcagattgaggaagcatgagaaactccacacggcggacaggccatttgtttgtgaaatgtgcacaaaaggtttcaccacacaggcccacctgaaagaacacctaaaaatccacacaggatataagccctatagctgtgaggtgtgtggaaaatcatttatccgtgccccagacttaaagaagcatgagagagttcacagtaatgaaagaccgtttgcgtgccacatgtgtgacaaagccttcaaacacaagtctcacctcaaggatcatgaaagaagacacagaggggaaaagccttttgtgtgtggctcctgcaccaaggcatttgccaaggcatctgatctgaaaaggcacgagaacaatatgcacagtgaaaggaagcaggttacccccagtgccatccagagcgagacagaacagttgcaggcggcagcgatggctgcggaagcagaacagcagctggagacgatagcctgtagctag

SEQ ID NO: 354 - DNA, 4671 bp, Homo Sapiens
atggcctcggagttgggtgccagggatgatggaggctgcactgagctggcaaagcccctctatcttcagtacttggagagggccctccggttggaccattttctgcgacaaacgtcagctatcttcaataggaatatttctagtgatgacagtgaagatggactggatgacagtaatccattattgccccagtctggggatcccttaatacaagttaaggaagaacctccaaattcattgcttggtgaaacttctggagcaggcagttctggaatgttaaacacatattctctgaatggagttctacagtcagaatcaaaatgtgataaggggaatttatataatttctctaagctgaagaaaagcagaaagtggctaaagagcattctgctaagtgatgaatccagcgaggctgattctcagagtgaagacgatgatgaagaagaactcaatctcagcagagaagaacttcacaacatgcttcgactacacaaatataagaaacttcaccaaaataagtatagtaaagacaaggagttgcagcaatatcagtactacagtgcaggcctgctctccacatatgaccctttctatgagcaacaacggcacctacttggacccaagaaaaagaaatttaaggaggaaaagaaacttaaagctaagttgaaaaaagtgaagaaaaaaagacgaagagatgaagaactttcctctgaagaatcccctcgtcgccatcaccaccagaccaaagtctttgccaagttttctcacgatgcacctccccctggcactaagaaaaagcacttatccattgagcagctgaatgctcgtcgcaggaaagtatggctcagcattgtgaaaaaggaactaccaaaggcaaataagcagaaagcttcagctcgtaacctgtttctcaccaatagccgaaagcttgctcaccagtgcatgaaggaggtgcgtcgagctgccttgcaggcccagaagaactgtaaggaaaccttgcctcgtgcccgccgcctcaccaaggagatgcttctgtactggaagaaatatgagaaagtagagaaggagcaccgcaagagagcagagaaggaagctttggagcagcggaagttggatgaggaaatgcgggaggccaagaggcaacagcgaaaactcaacttcttaattacccagacagagttgtatgcccatttcatgagtcgcaaacgagatatgggtcatgatggtatccaggaagaaatcctaaggaaactggaagacagttctacccagagacaaatcgatataggtggaggagtggtagttaacatcacacaggaggattatgatagtaaccattttaaagcccaggccctgaagaatgctgaaaatgcttaccatattcaccaagctcggacaaggtcatttgatgaagatgcaaaagaaagtcgagcagctgccctacgggcagcaaacaagtctggcactgggtttggggagagttatagcctggctaacccatctatccgggctggtgaggatattccacagcccacaatttttaatggcaaattgaaaggttatcaactgaaaggcatgaattggttggccaatctatatgaacagggtattaatggcattcttgctgatgaaatgggccttggtaaaacagtacagagcattgcccttctggcccatctggctgagagagagaacatttggggacctttcttaataatttcacctgcgtctacacttaacaattggcaccaggagtttactagatttgttcctaaatttaaggtgctaccatattggggaaatcctcatgatagaaaagtcatcagaaggttctggagtcagaagaccctctacactcaggatgcccccttccatgtggttattaccagctatcagctggtggtgcaggatgtaaagtatttccagcgggtcaagtggcaatacatggtactggatgaggctcaggcgctcaagagtagttccagtgttcgttggaagatcctcttacagttccagtgtcggaatcggcttttgctaaccgggaccccaattcagaacaccatggcagagctttgggctctgctgcatttcattatgccaacattatttgattcacatgaggaatttaatgaatggttttccaaggacattgagagccatgccgaaaacaaatctgctattgatgagaatcaactttctcgcttacacatgattttgaagccatttatgctgaggagaatcaagaaagatgtggaaaatgaattatctgacaagattgagattctaatgtattgccaactgaccagccgacagaagctgctatatcaggcactaaagaacaaaatttccattgaggatttattgcagtcttctatgggctctacccaacaagcacagaacaccaccagcagcctcatgaatctggtcatgcagtttaggaaggtgtgtaatcacccggagttatttgaacggcaagaaacttggtctccatttcatatttccctaaagccataccacatttcaaagtttatctaccgtcatggacagatcagggtcttcaatcattcacgagacaggtggttaagggttctttctccatttgcaccagactatatccaacggtctctctttcacagaaaaggtattaatgaagaaagctgtttctctttccttcgctttattgatatatctccagcagaaatggcaaaccttatgcttcagggacttttggccagatggttagctcttttcctgtctctgaaagcctcctacaggctccatcagctacgctcctggggagcgccagaaggggagagccaccagagatacctgaggaacaaggatttccttcttggggttaattttccactctcctttccaaacctttgcagctgccctttgttaaagtctcttgttttcagcagccactgtaaagcagtgagtggctactcagaccaggttgtccatcagcggagatcagctacctcctcgctgcgtcgctgcctgctcactgagctgccatcttttttgtgtgtggccagtccacgagttaccgcagtgccattggattcttactgcaatgaccgaagtgcagaatatgaaaggcgagttctgaaggaaggagggagtctggcagccaagcagtgtttgttgaatggggcccctgaactggctgcagactggctaaatagacgatcacagttcttcccagagccagctggaggtctgtggagcatcagacctcagaatggctggtctttcatcaggattccaggcaaggagagcctcatcactgacagtggaaagctgtatgcccttgatgtcctgctgactcggctcaagtctcaagggcatagggtccttatctactcccagatgaccaggatgatagacctactggaggaatacatggtttacaggaagcatacctacatgaggcttgatggctcatccaagatctcggagaggcgagacatggttgctgattttcagaacaggaatgacatctttgtgttcctgttaagcacacgagctggaggactgggtatcaatctcactgctgcagacacagtgattttctatgatagcgactggaaccccactgtggaccagcaggccatggacagggcccaccgcttagggcagacaaagcaggttactgtgtaccggctcatctgtaaaggcaccattgaagaacgcattctgcaaagagccaaggagaagagtgagattcagcggatggtgatttcaggtgggaacttcaaaccagataccttgaaacccaaagaggtggttagtcttcttctagacgacgaagagttggagaagaaactgaggctgcggcaggaagagaaacggcaacaggaggaaaccaaccgagtgaaagagcgcaagcggaagcgggaaaagtatgcagagaagaagaaaaaagaagatgaattggatgggaaaaggagaaaagagggtgtgaacctggtgatcccatttgttccctcggctgataactccaacctctctgctgacggagatgactccttcattagcgtggactcagccatgccaagccctttcagtgagatctccatcagcagtgagctgcacactggctccattcccctggacgagagcagcagtgacatgctggtcattgtggatgacccagcctcctcagcccctcagtctcgagctaccaactctcccgcatccataacaggctccgtctcagataccgtgaatggaatttccattcaggaaatgccagctgcaggacgtggtcactcagcccgaagccgaggccgccccaaaggttcaggaagcacagccaaaggagcagggaagggccggagccgaaagtccacggcaggcagtgctgctgcaatggcaggagccaaagccggggctgcagcggcctctgcagctgcctatgccgcatacgggtacaacgtgtctaaaggaatctccgccagcagtcctctgcagacatcccttgttcggcctgctggccttgctgactttggaccttcaagcgcctcttctcctttgagttcccctttgagcaagggaaataatgttcctgggaatcccaagaacctccacatgaccagcagcctagccccagactctctggtccggaaacagggcaaaggcaccaacccctctggaggacggtaa

SEQ ID NO: 355 - DNA, 2196 bp, Homo Sapiens
atggtgaagcccaagtacaaaggacggagcaccatcaacccgtccaaggccagcacaaacccagatcgagtgcagggagcaggaggccaaaacatgagggaccgggccaccatccggcgcctgaatatgtataggcaaaaggagcgcaggaacagtcgtggtaaaataattaaacccctgcaatatcaatcaacggtggcttctggcacagtggcaagagtagagccaaatattaaatggtttggaaacacacgtgtgattaagcagtcatcattacaaaaatttcaagaggaaatggatacagttatgaaggatccatacaaagttgtcatgaagcaaagcaagttaccaatgtctcttctccatgatcgaatccggcctcataacttgaaggtgcacattcttgatactgaaagttttgaaactacatttggccctaagtcacagaggaaacgaccaaacttatttgcaagtgatatgcagtctcttatcgaaaatgctgaaatgtccactgagagctatgaccagggcaaggatcgtgatttggtaactgaagacactggtgtgagaaatgaagctcaagaagagatctataaaaagggacagtccaaaagaatatggggtgagctctacaaggtgatagattcatcagatgttgtagttcaagttcttgatgctagagatccaatgggtactcgttcccctcacattgaaacttacctgaagaaggaaaaaccttggaaacacctcatttttgtacttaacaaatgtgaccttgttccaacctgggcaacaaaacggtgggttgctgtcctctcccaggattatccaacacttgctttccatgcaagccttactaacccgtttggcaagggagcattcattcagcttctgcggcagtttggaaagttgcacactgacaagaaacagatcagtgttgggttcattggctatccaaatgttggcaagagctctgtgataaatacattgcgttctaagaaagtttgcaacgtggctcccattgcaggtgaaacaaaggtctggcagtatattactttgatgcgtcggatattcctgattgactgtccaggtgtggtttacccctctgaggactccgagacagacattgtgctaaaaggagttgttcaagtagaaaaaattaagagtcctgaagaccacattggtgctgtacttgaacgagcaaagccagaatatatcagcaaaacatacaagattgattcttgggagaatgctgaggactttcttgagaagctcgctttccggactgggaagttactaaagggtggagagcccgacttgcagactgtgggtaagatggtcctcaatgactggcagaggggccggattcctttctttgtcaagccacccaatgcagagccacttgtggccccccagcttctaccctcctcatctttggaagttgtcccagaagcagcccagaacaatccaggggaggaagtcacagaaactgcaggtgaagggtcagaatccatcattaaggaagaaacagaagagaacagtcactgtgatgctaacacagagatgcagcagattctcacacgagttcggcagaactttggtaaaatcaacgtggtgcctcagttttctggggatgacctggttcctgtggaggtgtcagatcttgaggaagagcttgagagcttttctgatgaagaggaggaggaacaggagcaacaaagagatgatgcggaagagtcttcctcggagcctgaggaggaaaatgtgggaaacgacaccaaagccgttattaaagcactggatgagaagattgccaaatatcagaagtttctagacaaagccaaagccaaaaagttttcagcagtcagaatatccaagggactgagtgaaaagatatttgcaaaacctgaagaacaaagaaaaacactggaagaagatgtagatgacagagcaccttccaaaaagggaaagaagcggaaggcacaaagggaagaggaacaggaacattcaaataaagctcccagggcgcttacatcaaaagaacggaggcgagcagtacgacagcaacggccgaaaaaagttggtgtgcgctactatgaaacacacaacgtgaaaaataggaacaggaacaaaaagaagaccaatgactcagagggacagaaacacaaacgcaaaaaattcagacaaaagcagtaa

SEQ ID NO: 356 - DNA, 381 bp, Homo Sapiens
atgcctttctttgggaatacgttcagtccgaagaagacacctcctcggaagtcggcatctctctccaacctgcattctttggatcgatcaacccgggaggtggagctgggcttggaatacggatccccgactatgaacctggcagggcaaagcctgaagtttgaaaatggccagtggatagcagagacaggggttagtggcggtgtggaccggagggaggttcagcgccttcgcaggcggaaccagcagttggaggaagagaacaatctcttgcggctgaaagtggacatcttattagacatgctttcagagtccactgctgaatcccacttaatggagaaggaactggatgaactgaggatcagccggaagagaaaatga

SEQ ID NO: 357 - DNA, 1176 bp, Homo Sapiens
atgcccggcccccaggggggcagaggcgccgccaccatgagcctgggcaagctctcgcctgtgggctgggtgtccagttcacagggaaagaggcggctgactgcagacatgatcagccacccactcggggacttccgccacaccatgcatgtgggccgtggcggggatgtcttcggggacacgtccttcctcagcaaccacggtggcagctccgggagcacccatcgctcaccccgcagcttcctggccaagaagctgcagctggtgcggagggtgggggcgcccccccggaggatggcatctccccctgcaccctccccggctccaccggccatctcccccatcatcaagaacgccatctccctgccccagctcaaccaggccgcctacgacagcctcgtggttggcaagctcagcttcgacagcagccccaccagctccacggacggccactccagctacggcctggactctgggttctgcaccatctcccgcctgccccgctcggaaaagccgcatgaccgagaccgggatggttccttcccctctgagcccgggcttcgccgctctgactctctcttgtccttccgcctggacctcgaccttgggccctcactcctcagcgagctgctaggggtcatgagcctcccagaagcccctgcagctgagactccagcccccgctgcaaaccccccagcccctactgcaaaccccacgggtcctgctgcaaaccccccagccactactgcaaaccccccagcgcctgctgcaaacccctcagcacctgccgcaacccccacgggtcctgctgcaaatcccccagcccctgccgcaagctccacaccccatggacactgtcccaatggggtaacagctgggttgggcccagtggctgaggtgaagtccagcccagtgggagggggtccccgaggacctgctggccctgccctcggcaggcactggggagcaggctgggatggcggccaccactacccagagatggatgcgcggcaggagcgggtggaggtgctgccccaagcccgggcctcctgggagagcctggacgaagagtggagggcgccccaggcaggcagcaggaccccagtgcccagcacagtgcaagcaaacacctttgaatttgcggatgctgaggaggatgatgaggtcaaggtgtga

SEQ ID NO: 358 - DNA, 1485 bp, Homo Sapiens
atgtttgaaattaagaagatctgttgcatcggtgcaggctatgttggaggacccacatgtagtgtcattgctcatatgtgtcctgaaatcagggtaacggttgttgatgtcaatgaatcaagaatcaatgcgtggaattctcctacacttcctatttatgagccaggactaaaagaagtggtagaatcctgtcgaggaaaaaatctttttttttctaccaatattgatgatgccatcaaagaagctgatcttgtatttatttctgtgaatactccaacaaaaacctatggaatggggaaaggccgggcagcagatctgaagtatattgaagcttgtgctagacgcattgtgcaaaactcaaatgggtacaaaattgtgactgagaaaagcacagttccagtgcgggcagcagaaagtatccgtcgcatatttgatgcaaacacaaaacccaacttgaatttacaggtgctgtccaaccctgagtttctggcagagggaacagccatcaaggacctaaagaacccagacagagtactgattggaggggatgaaactccagagggccagagagctgtgcaggccctgtgtgctgtatatgagcactgggttcccagagaaaagatcctcaccactaatacttggtcttcagagctttccaaactggcagcaaatgcttttcttgcccagagaataagcagcattaactccataagtgctctgtgtgaagcaacaggagctgatgtagaagaggtagcaacagcgattggaatggaccagagaattggaaacaagtttctaaaagccagtgttgggtttggtgggagctgtttccaaaaggatgttctgaatttggtttatctctgtgaggctctgaatttgccagaagtagctcgttattggcagcaggtcatagacatgaatgactaccagaggaggaggtttgcttcccggatcatagatagtctgtttaatacagtaactgataagaagatagctattttgggatttgcattcaaaaaggacactggtgatacaagagaatcttctagtatatatattagcaaatatttgatggatgaaggtgcacatctacatatatatgatccaaaagtacctagggaacaaatagttgtggatctttctcatccaggtgtttcagaggatgaccaagtgtcccggctcgtgaccatttccaaggatccatatgaagcatgtgatggtgcccatgctgttgttatttgcactgagtgggacatgtttaaggaattggattatgaacgcattcataaaaaaatgctaaagccagcctttatcttcgatggacggcgtgtcctggatgggctccacaatgaactacaaaccattggcttccagattgaaacaattggcaaaaaggtgtcttcaaagagaattccatatgctccttctggtgaaattccgaagtttagtcttcaagatccacctaacaagaaacctaaagtgtag

SEQ ID NO: 359 - DNA, 1266 bp, Homo Sapiens
atgtacgcctttgtgcggttcctggaggacaacgtctgctacgcgctgcccgtgtcgtgcgtgcgcgacttcagcccccgctcgcggctggattttgacaaccagaaggtgtacgccgtgtaccggggcccggaggaattgggcgccgggcccgagagccccccgcgcgccccccgcgactggggcgcgctgttgctccacaaggcccagatcctggcgctggcagaagacaaatctgaccttgaaaacagtgtgatgcagaagaaaataaaaatccccaagctttctcttaatcatgtagaagaagatggagaggttaaagattatggggaagaagatttacagcttagacacatcaagagacctgaggggcggaagccgagcgaagtggcgcacaagagcatcgaggcagtggtggctcggctagagaagcagaacggcctgagcctgggccatagcacgtgtccggaagaggtcttcgtggaggcctcgccaggcacagaggacatggacagtctagaagatgctgtggtgccccgggctctgtatgaggagctgctgcgcaactaccagcagcaacaggaagagatgcgccacctccagcaggagctggagcggactcggaggcagctggtacaacaggccaagaagctcaaggagtacggggcacttgtgtctgaaatgaaggagctccgtgaccttaaccggaggctccaggacgtgctgctcctgcggcttggcagcggtcccgccattgatctggaaaaagtaaagtcagaatgtctcgagcccgagccggagttacggagcactttcagtgaggaagcaaatacgtcgtcctattaccccgctcctgcgcctgtcatggacaagtatatcctagacaatggcaaggtccatctgggaagcgggatttgggttgatgaggagaaatggcaccagctacaagtaacccaaggagattccaagtacacgaagaacttggcagttatgatttggggaacagatgttctgaaaaacagaagcgtcacaggcgtcgccacaaaaaaaaagaaagatgcagtccctaaaccacccctctcgcctcacaaactaagcatcgtcagagagtgtttgtatgacagaatagcacaagaaactgtggatgaaactgaaattgcacagagactctccaaagtcaacaagtacatctgtgaaaaaatcatggatatcaataaatcctgtaaaaatgaagaacgaagggaagcaaaatacaatttgcaataa

SEQ ID NO: 360 - DNA, 2034 bp, Homo Sapiens
atggattttcctggtcactttgaacaaatcttccagcagctgaactaccagagacttcatggccagctctgtgattgtgtcattgtagtggggaatagacactttaaagcccaccgctccgtgctggcagcatgcagcacgcatttccgagccctgttctcagtggcagaaggagatcagaccatgaacatgatccagctggatagcgaggtggtgacagcagaggcctttgctgcactgattgacatgatgtatacctccaccctcatgctgggggagagcaatgtaatggatgtcttattggcagcctctcacctgcatttgaactctgttgttaaggcatgtaaacattacttaacgacaaggacgctgcccatgtctccccccagtgagcgcgttcaggagcagagcgcccgcatgcagcgctcctttatgctacagcagctgggactaagcatcgtgagctcagccctcaattccagccagaatggcgaggagcagccagcccccatgagctcttccatgcgcagtaacctggatcagcgcacgcccttccccatgagacgccttcataagcgcaagcagtctgcagaggagcgggccaggcagcgcctccgaccctccatagatgagtctgccatttcagatgttacaccggagaatgggccttcaggggttcattctcgggaggagttcttttcaccagattctctgaaaattgtggataatcctaaagctgatggaatgactgataaccaggaagatagtgcgatcatgtttgatcagtcttttggcactcaagaagatgcccaggtgcccagccagtctgataacagtgctggcaacatggcacagttgtccatggcctctcgtgcaactcaggttgagactagttttgatcaggaagctgcacctgagaaaagtagttttcagtgtgaaaaccctgaggttggccttggtgagaaggagcacatgagagtggtggttaaatctgagcccctgagctcacctgagcctcaggatgaagtgagcgatgtgacctcacaagcagaaggcagcgagtctgtggaagtggaaggagttgtggtcagtgccgagaagatagacctcagccctgaaagcagtgatcggagtttttcagatccccagtctagcacagacagggtaggtgatatccatattttggaagtcacaaataacctagagcataagtccacttttagtatttcgaattttcttaacaagagcagaggaaataactttactgcaaatcagaacaatgatgataatattccaaacaccactagtgactgcaggctggagagtgaggccccctatttgttgagtccagaggctgggcctgcaggtgggccctcctctgcccctggctcccatgtagagaacccatttagtgaacctgcagactcccacttcgtcaggcctatgcaggaggtgatgggcctgccgtgtgtgcagacttcaggctaccaaggaggagaacagtttgggatggacttttccaggtctggtttgggcctccactcctccttctccagggtaatgataggttccccaaggggaggagccagtaactttccttactaccgccgcatagctcccaaaatgccagttgtaacttccgtcaggagctcacagatcccagaaaactctaccagttctcagctaatgatgaatggagctacgtcctcatttgaaaatggccatccttcccagcctggccctccacagttgaccagggcatctgcagatgttctgtcaaagtgcaagaaggccttatcagagcacaatgttttggttgtagagggagctcgcaagtatgcctgcaaaatctgctgcaaaacttttctgactttgacagattgcaagaagcacatccgtgttcacacaggtgaaaagccttacgcctgcctgaagtgtggcaagaggtttagtcagtccagccacctgtataagcactcaaagactacctgcctgcgctggcagagcagcaatcttcccagcactttgctctag

SEQ ID NO: 361 - DNA, 321 bp, Homo Sapiens
atggtcaacgtacctaaaacccgaagaaccttctgtaagaagtgtggcaagcatcagcctcacaaagtgacacagtataagaagggcaaggattctttgtatgcccagggaaggaggcgctatgatcggaagcagagtggctatggtgggcagacaaagccaattttccggaagaaggctaagaccacaaagaagattgtgctaaggctggaatgtgttgagcctaactgcagatccaagaggatgctggccattaagagatgcaagcattttgaactgggaggagataagaagagaaagggccaagtgatccagttctaa

SEQ ID NO: 362 - DNA, 651 bp, Homo Sapiens
atggcgggtcggggaggcgcagcacgacccaatggaccagctgctgggaacaagatctgtcaatttaagctggttctgctgggggagtctgcggtaggcaaatccagcctcgtcctccgctttgtcaagggacagtttcacgagtaccaggagagcacaattggagcggccttcctcacacagactgtctgcctggatgacacaacagtcaagtttgagatctgggacacagctggacaggagcggtatcacagcctggcccccatgtactatcggggggcccaggctgccatcgtggtctatgacatcaccaacacagatacatttgcacgggccaagaactgggtgaaggagctacagaggcaggccagccccaacatcgtcattgcactcgcgggtaacaaggcagacctggccagcaagagagccgtggaattccaggaagcacaagcctatgcagacgacaacagtttgctgttcatggagacatcagcaaagactgcaatgaacgtgaacgaaatcttcatggcaatagctaagaagcttcccaagaacgagccccagaatgcaactggtgctccaggccgaaaccgaggtgtggacctccaggagaacaacccagccagccggagccagtgctgcagcaactga

SEQ ID NO: 363 - DNA, 3462 bp, Homo Sapiens
atggcctgtccttggaaatttctgttcaagaccaaattccaccagtatgcaatgaatggggaaaaagacatcaacaacaatgtggagaaagccccctgtgccacctccagtccagtgacacaggatgaccttcagtatcacaacctcagcaagcagcagaatgagtccccgcagcccctcgtggagacgggaaagaagtctccagaatctctggtcaagctggatgcaaccccattgtcctccccacggcatgtgaggatcaaaaactggggcagcgggatgactttccaagacacacttcaccataaggccaaagggattttaacttgcaggtccaaatcttgcctggggtccattatgactcccaaaagtttgaccagaggacccagggacaagcctacccctccagatgagcttctacctcaagctatcgaatttgtcaaccaatattacggctccttcaaagaggcaaaaatagaggaacatctggccagggtggaagcggtaacaaaggagatagaaacaacaggaacctaccaactgacgggagatgagctcatcttcgccaccaagcaggcctggcgcaatgccccacgctgcattgggaggatccagtggtccaacctgcaggtcttcgatgcccgcagctgttccactgcccgggaaatgtttgaacacatctgcagacacgtgcgttactccaccaacaatggcaacatcaggtcggccatcaccgtgttcccccagcggagtgatggcaagcacgacttccgggtgtggaatgctcagctcatccgctatgctggctaccagatgccagatggcagcatcagaggggaccctgccaacgtggaattcactcagctgtgcatcgacctgggctggaagcccaagtacggccgcttcgatgtggtccccctggtcctgcaggccaatggccgtgaccctgagctcttcgaaatcccacctgaccttgtgcttgaggtggccatggaacatcccaaatacgagtggtttcgggaactggagctaaagtggtacgccctgcctgcagtggccaacatgctgcttgaggtgggcggcctggagttcccagggtgccccttcaatggctggtacatgggcacagagatcggagtccgggacttctgtgacgtccagcgctacaacatcctggaggaagtgggcaggagaatgggcctggaaacgcacaagctggcctcgctctggaaagaccaggctgtcgttgagatcaacattgctgtgctccatagtttccagaagcagaatgtgaccatcatggaccaccactcggctgcagaatccttcatgaagtacatgcagaatgaataccggtcccgtgggggctgcccggcagactggatttggctggtccctcccatgtctgggagcatcacccccgtgtttcaccaggagatgctgaactacgtcctgtcccctttctactactatcaggtagaggcctggaaaacccatgtctggcaggacgagaagcggagacccaagagaagagagattccattgaaagtcttggtcaaagctgtgctctttgcctgtatgctgatgcgcaagacaatggcgtcccgagtcagagtcaccatcctctttgcgacagagacaggaaaatcagaggcgctggcctgggacctgggggccttattcagctgtgccttcaaccccaaggttgtctgcatggataagtacaggctgagctgcctggaggaggaacggctgctgttggtggtgaccagtacgtttggcaatggagactgccctggcaatggagagaaactgaagaaatcgctcttcatgctgaaagagctcaacaacaaattcaggtacgctgtgtttggcctcggctccagcatgtaccctcggttctgcgcctttgctcatgacattgatcagaagctgtcccacctgggggcctctcagctcaccccgatgggagaaggggatgagctcagtgggcaggaggacgccttccgcagctgggccgtgcaaaccttcaaggcagcctgtgagacgtttgatgtccgaggcaaacagcacattcagatccccaagctctacacctccaatgtgacctgggacccgcaccactacaggctcgtgcaggactcacagcctttggacctcagcaaagccctcagcagcatgcatgccaagaacgtgttcaccatgaggctcaaatctcggcagaatctacaaagtccgacatccagccgtgccaccatcctggtggaactctcctgtgaggatggccaaggcctgaactacctgccgggggagcaccttggggtttgcccaggcaaccagccggccctggtccaaggtatcctggagcgagtggtggatggccccacaccccaccagacagtgcgcctggaggccctggatgagagtggcagctactgggtcagtgacaagaggctgcccccctgctcactcagccaggccctcacctacttcctggacatcaccacacccccaacccagctgctgctccaaaagctggcccaggtggccacagaagagcctgagagacagaggctggaggccctgtgccagccctcagagtacagcaagtggaagttcaccaacagccccacattcctggaggtgctagaggagttcccgtccctgcgggtgtctgctggcttcctgctttcccagctccccattctgaagcccaggttctactccatcagctcctcccgggatcacacgcccacagagatccacctgactgtggccgtggtcacctaccacacccgagatggccagggtcccctgcaccacggcgtctgcagcacatggctcaacagcctgaagccccaagacccagtgccctgctttgtgcggaatgccagcggcttccacctccccgaggatccctcccatccttgcatcctcatcgggcctggcacaggcatcgcgcccttccgcagtttctggcagcaacggctccatgactcccagcacaagggagtgcggggaggccgcatgaccttggtgtttgggtgccgccgcccagatgaggaccacatctaccaggaggagatgctggagatggcccagaagggggtgctgcatgcggtgcacacagcctattcccgcctgcctggcaagcccaaggtctatgttcaggacatcctgcggcagcagctggccagcgaggtgctccgtgtgctccacaaggagccaggccacctctatgtttgcggggatgtgcgcatggcccgggacgtggcccacaccctgaagcagctggtggctgccaagctgaaattgaatgaggagcaggtcgaggactatttctttcagctcaagagccagaagcgctatcacgaagatatctttggtgctgtatttccttacgaggcgaagaaggacagggtggcggtgcagcccagcagcctggagatgtcagcgctctga

SEQ ID NO: 364 - DNA, 3654 bp, Homo Sapiens
atgtacataaagcaggtgattatccagggttttcgaagttacagagatcaaacaattgtagatcccttcagttcaaaacataatgtgattgtgggcagaaatggatctggaaaaagtaactttttttatgcaattcagtttgttctcagtgatgagtttagtcatcttcgtccagaacagcggttggctttattgcatgaaggtactggtcctcgtgttatttctgcttttgtggagattatttttgataattcagacaaccggttaccaatcgataaagaggaagtttcacttcgaagagttattggtgccaaaaaggatcagtatttcttagacaagaagatggtcacgaaaaatgatgtgatgaacctccttgaaagcgctggtttttctcgaagcaatccttattatattgttaaacaaggaaagatcaaccagatggcaacagcaccagattctcagagattaaagctattaagagaagtagctggtactagagtgtatgacgaacgaaaggaagaaagcatctccttaatgaaagaaacagagggcaaacgggaaaaaatcaatgagttgttaaaatacattgaagagagattacatactctagaggaagaaaaggaagaactagctcagtatcagaagtgggataaaatgagacgagccctggaatataccatttacaatcaggaacttaacgagactcgtgccaaacttgatgagctttctgctaagcgagagactagtggagaaaaatccagacaattaagagatgctcagcaggatgcaagagataaaatggaggatatcgaacgccaagttagagaattgaaaacaaaaatttcagctatgaaagaagaaaaagaacagcttagtgctgaaagacaagagcagattaagcagaggactaagttggagcttaaagccaaggatttacaagatgaactagcaggcaatagtgaacaaaggaaacgtttattaaaagagaggcagaagctgcttgaaaaaatagaagaaaagcagaaagaactggcagaaacagaacccaaattcaacagtgtgaaagagaaagaagaacgaggaattgctagattggctcaagctacccaggaaagaacggatctttatgcaaagcagggtcgaggaagccagtttacatcaaaagaagaaagggataagtggattaaaaaggaactcaagtctttagatcaggctattaatgacaagaaaagacagattgctgctatacataaggatttggaagacactgaagcaaataaagagaaaaatctggagcagtataataaactggaccaggatcttaatgaagtcaaagctcgagtagaagaactggacagaaaatattacgaagtaaaaaataagaaagatgaactacaaagtgaaagaaactacttgtggagagaagagaatgcagaacagcaagcacttgctgctaaaagagaagatcttgaaaagaagcaacaacttcttagagcagcaacaggaaaggccattttaaatggaatagacagcataaacaaagtgctagaccacttccgtcgaaaaggaataaaccagcatgttcaaaatggctatcatggtattgtaatgaataactttgaatgtgaaccagctttctacacatgcgtggaagtcactgctggaaacaggttattttatcacattgttgattcagatgaagtcagcacgaagattttaatggagtttaataaaatgaatcttcctggagaggttacttttctgcctcttaacaagttagatgtcagggatacagcctatcctgaaaccaatgatgctattcctatgatcagcaaactgaggtacaatcccagatttgacaaagctttcaaacatgtgtttggaaagactcttatttgtcgtagcatggaagtttcaacccagctggcccgtgctttcactatggactgtattactttggaaggtgaccaagtcagccatcggggtgctctaactgggggttattatgacacaaggaagtctcgacttgaattgcaaaaagatgttagaaaagcagaagaagaactaggtgaacttgaagcaaagctcaatgaaaacctgcgcagaaatattgaaaggattaataatgaaattgatcagttgatgaaccaaatgcaacagatcgagacccagcaaaggaaatttaaagcatctagagatagcatattatcagaaatgaagatgctaaaagagaagaggcagcagtcagagaaaaccttcatgcctaagcaacgtagcttacagagtttggaggcaagcttgcatgctatggagtctaccagagagtcattgaaagcagaactgggaactgatttgctttctcaactgagtttggaagatcagaagagagtagatgcactgaatgatgagattcgtcaacttcagcaggaaaacagacagttgctaaatgaaagaattaaattagaaggtattattactcgagtagagacttatctcaatgagaatctgagaaaacgcttggaccaagtagaacaggaacttaatgagctgagagagacagaagggggtactgttctcacagccacaacatcagaacttgaagccatcaataaaagagtaaaagacactatggcacgatcagaagatttggacaattccattgataaaacagaagctggaattaaggagcttcagaagagtatggagcgctggaaaaatatggaaaaagaacatatggatgctataaatcatgatactaaagaactggaaaagatgacaaatcggcaaggcatgctattgaagaagaaagaagagtgtatgaagaaaattcgagaacttggatcacttccccaggaagcatttgaaaagtaccagacactgagcctcaaacagttgtttcgaaaacttgagcagtgcaacacagaattaaagaagtacagccatgttaacaaaaaggctttggatcagtttgtaaatttctccgagcagaaagaaaagttaataaagcgtcaagaagagttagataggggttacaaatcaatcatggaactgatgaatgtacttgaacttcggaaatatgaagctattcagttaactttcaaacaggtatctaagaacttcagtgaagtattccagaagttagtacctggtggcaaagctactttggtgatgaagaaaggagatgtggagggcagtcagtctcaagatgaaggagaagggagtggtgagagtgagaggggttctggctcacaaagcagtgtcccatcagttgaccagtttactggagttggaattagggtgtcatttacaggaaaacaaggtgaaatgagagaaatgcaacagctttcaggtggacagaaatccttggtagcccttgctctgatttttgccattcagaaatgtgacccggctccattttacttgtttgatgaaattgaccaggctctggatgctcagcacagaaaggctgtgtcagatatgattatggaacttgctgtacatgctcagtttattacaactacttttaggcctgaactgcttgagtcagctgacaaattctatggtgtaaagttcagaaataaggttagtcatattgatgtgatcacagcagagatggccaaagactttgtagaagatgataccacacatggttaa

SEQ ID NO: 365 - DNA, 945 bp, Homo Sapiens
atggggctggaggcggcgcgcgagctggagtgcgcggcgctgggcacgctgctgcgggatccgcgggaggcggaacgcacgctgctgctggactgccgccccttcctggccttctgccggcgccacgtgcgcgccgcgcggccagtgccttggaacgcgctgctgcggcgccgcgcgcgcggccctcctgccgccgttctcgcctgcctgctgcccgaccgcgcgctgcggacgcgcctggtccgcggggagctggcgcgggccgtggtgctggacgagggcagtgcctcggtggcggagctccggcccgacagcccggctcatgtgctgctggccgcgctgctgcacgagacccgcgcggggcccactgccgtgtacttcctgcgaggaggcttcgacggcttccagggctgctgtcccgatctgtgctctgaggcccccgcccctgcgctgccgccaacaggggacaaaaccagccgctccgactccagggctcctgtctacgaccagggtggccctgtggagatcttgccctacctgttcctgggcagctgcagtcactcgtcagacctgcaggggctgcaggcctgtggcatcacagccgtcctcaacgtgtccgccagctgccccaaccactttgagggccttttccgctacaagagtatccctgtggaggacaaccagatggtggagatcagtgcctggttccaggaggccataggcttcattgactgggtgaagaacagcggaggccgggtgctggtgcactgccaggcgggtatctcgcgctctgccaccatctgtctggcatacctcatgcagagtcgccgtgtgcggctggacgaggcctttgacttcgttaagcagcgccggggggtcatctcccccaacttcagtttcatggggcagctgctgcagtttgagacccaggtgctgtgtcactga

SEQ ID NO: 366 - DNA, 1047 bp, Homo Sapiens
atggcggcaggggtggccgggtggggggttgaggcagaggagttcgaagatgctcctgatgtggagccgctggagcctacacttagcaacatcatcgagcagcgcagcctgaagtggatcttcgtcgggggcaagggtggtgtgggcaagaccacctgcagctgcagcctggcagtccagctctccaaggggcgtgagagtgttctgatcatctccacagacccagcacacaacatctcagatgcttttgaccagaagttctcaaaggtgcctaccaaggtcaaaggctatgacaacctctttgctatggagattgaccccagcctgggcgtggcggagctgcctgacgagttcttcgaggaggacaacatgctgagcatgggcaagaagatgatgcaggaggccatgagcgcatttcccggcatcgatgaggccatgagctatgccgaggtcatgaggctggtgaagggcatgaacttctcggtggtggtatttgacacggcacccacgggccacaccctgaggctgctcaacttccccaccatcgtggagcggggcctgggccggcttatgcagatcaagaaccagatcagccctttcatctcacagatgtgcaacatgctgggcctgggggacatgaacgcagaccagctggcctccaagctggaggagacgctgcccgtcatccgctcagtcagcgaacagttcaaggaccctgagcagacaactttcatctgcgtatgcattgctgagttcctgtccctgtatgagacagagaggctgatccaggagctggccaagtgcaagattgacacacacaatataattgtcaaccagctcgtcttccccgaccccgagaagccctgcaagatgtgtgaggcccgtcacaagatccaggccaagtatctggaccagatggaggacctgtatgaagacttccacatcgtgaagctgccgctgttaccccatgaggtgcggggggcagacaaggtcaacaccttctcggccctcctcctggagccctacaagccccccagtgcccagtag

SEQ ID NO: 367 - DNA, 585 bp, Homo Sapiens
atggaagagaagctgaagaaaaccaagatcatctttgtggtgggtgggcctggctcagggaagggcacccagtgtgagaagatcgtgcagaagtatggctacacccacctctccaccggggacctcctgcggtccgaggtcagctcaggctcggccaggggcaagaagctgtcggaaatcatggagaaggggcagctggttccactggagacagtgttggacatgctccgggatgccatggtggccaaagtcaatacttccaaaggcttcctgattgatggctacccgcgggaggtgcagcaaggagaagagtttgagcgacggattggacagcccacactgctgctgtatgtggacgcaggccctgagaccatgacccagcggctcttgaaacgtggagagaccagcgggcgtgtggacgacaatgaggagaccatcaaaaagcggctggagacctattacaaggccacagaacccgtcatcgccttctatgagaaacgtggcattgtgcgcaaggtcaacgctgagggctccgtggacagtgtcttctcccaggtctgcacccacctggacgccctaaagtag

SEQ ID NO: 368 - DNA, 1503 bp, Homo Sapiens
atgaatcaacgaaggagtgagtcaaggcccgggaaccacagactccaagcctacgcagagcccgggaagggggattccggaggggcggggcctctttccggaagcgcccgccgggggcggggagggggcggggccatccgcgtgaggcgaccctgttggtccggaggggcggggcgaggaggaggacccgcttgggcggttcggctgcccacagtaaccgctgggtggacctggccagcgctccgaaccttgtcctcgctgcgcgccggcccctcggagccccacagcccgggaaggaggccgccgcgggccgggcgcccgctctgccaagcggacccgcaacccggaaaggcggcgcggcggagcctggagccggatcctgctcagaccgggccccggccggccagagccgcgggcatgtcggaggcgcggaaggggccggacgaggcggaggagagccagtacgactctggcattgagtctctgcgctctctgcgctccctacccgagtccacctcggctccagcctccgggccctcggacggcagcccccagccctgcacccatcctccgggacccgtcaaggaaccacaggagaaggaagacgcggatggggagcgggctgattccacctatggctcctcctcgctcacctacaccctgtccttgctggggggccccgaggctgaggacccggccccacgcctgccactcccccacgtgggggcgctgagccctcagcagctggaagcactcacttacatctccgaggacggagacacgctggtccacctggcagtgattcatgaggccccagcggtgctgctctgttgcctggctttgctgccccaggaggtcctggacattcaaaataacctttaccagacagcactccatctggctgtacatctggaccaaccgggcgcagttcgggcactggtgctgaagggggccagccgggcactacaggaccggcatggtgacacagcccttcatgtggcctgccagcgccagcacttggcctgtgcccgctgcctgctggaagggcggccagagccaggcagaggaacatctcactctctggacctccagctgcaaaactggcaaggtctggcttgtctccacattgccacccttcagaagaaccaaccactcatggaattgctgcttcggaatggagctgacattgatgtgcaggagggcaccagtggtaagacagcgctgcacctggctgtggaaacccaagagcggggcctggtacagttcctgctccaggctggtgcccaggtagatgcccgcatgctgaacgggtgcacacccctgcacctggcagctggccggggtctcatgggcatctcatccactctgtgcaaggcgggtgctgactccctgctgcggaatgtggaggatgagacgccccaggacctgactgaggaatcccttgtccttttgccctttgatgacctgaagatctcagggaaactgctgctgtgtaccgactga

SEQ ID NO: 369 - DNA, 3777 bp, Homo Sapiens
atgattacttcagaattaccagtgttacaggattcaactaatgaaactactgcccattccgatgctggcagcgagcttgaagaaacagaggtcaaaggaaaaagaaaaaggggtcgtcctggccggcctccatctacaaataagaaacctcgaaaatctccaggtgagaagagcagaattgaagctggaattagaggagcaggccgtggaagagctaatggacaccctcaacagaatggggaaggggagcctgtcacattatttgaggtggtgaaactggggaaaagtgcaatgcagtccgtggtggatgactggattgaatcatataaacaagacagggacatcgcacttctggatttaatcaacttttttatccagtgttcaggatgtcgaggtactgtgagaatagagatgtttcgaaatatgcagaatgcagaaatcatcagaaaaatgactgaagaatttgatgaggacagtggtgattatcctcttaccatgcctggacctcagtggaaaaaatttcgttcaaacttttgtgaatttattggagtcctgattcgacagtgtcagtatagcataatttatgatgagtatatgatggacacagtaatctcccttttgacgggtttgtcagactcccaggtcagagcttttaggcatacaagtaccctggctgccatgaagctcatgactgctctggtgaatgttgccttaaacctcagtattcatcaggataatacccagagacaatatgaagccgagagaaataaaatgattgggaagagagccaatgaaaggttggagttactacttcagaaacgcaaagagctgcaagaaaatcaggatgaaatcgaaaatatgatgaactctatttttaagggtatatttgttcatagataccgtgatgctattgctgagattagagccatttgtattgaagaaattggagtatggatgaaaatgtatagtgatgccttcctaaatgacagttacctaaaatatgttggctggactcttcatgacaggcaaggggaagtcaggctgaagtgtttgaaagctctgcagagtctatataccaatagagaattattccccaaattggaactattcactaaccgattcaaggatcgcattgtatcaatgacacttgataaagaatatgatgttgctgtggaagctattcgattggttactctgatacttcatggaagtgaagaagctctttccaatgaagactgtgaaaatgtttaccacttggtgtactcggcacatcgccctgttgctgtggcagctggagagttccttcacaaaaagctatttagcagacatgacccacaagcagaagaagcattagcaaagaggaggggaagaaacagcccgaatggaaacctcattaggatgctggttcttttctttcttgaaagtgagttacatgaacatgcagcctacttggtggacagtttatgggagagctctcaagaactgttgaaagactgggaatgtatgacagagttgctattagaagaacctgttcaaggagaggaagcaatgtctgatcgtcaagagagtgctcttatagagctaatggtttgtacaattcgtcaagctgctgaggcacatcctccagtgggaaggggtaccggcaagagagtgctaactgccaaagaaaggaaaactcaaattgatgatagaaacaaattgactgaacattttattattacacttcctatgttactgtcaaagtattctgcagatgcagagaaggtagcaaacttgctacaaatcccacagtattttgatttagaaatctacagcacaggtagaatggaaaagcatctggatgctttattaaaacagattaagtttgttgtggagaaacacgtagaatcagatgttctagaagcctgcagtaaaacctatagtatcttatgcagtgaagaatataccatccagaacagagttgacatagctcgaagccagctgattgatgagtttgtagatcgattcaatcattctgtggaagacctattgcaagagggagaagaagctgatgatgatgacatttacaatgttctttctacattaaagcggttaacttcttttcacaatgcacatgatctcacaaaatgggatctctttggtaattgctacagattattgaagactggaattgaacatggagccatgccagaacagatagtcgtgcaagcactgcagtgttcccattattcgattctttggcagttggtgaaaattactgatggctctccttccaaagaggatttgttggtattgaggaaaacggtgaaatcctttttggctgtttgccagcagtgcctgtctaatgttaatactccagtgaaagaacaggctttcatgttactctgtgatcttctgatgattttcagccaccaattaatgacaggtggcagagagggccttcagcctttggtgttcaatccagatactggactccaatctgaactcctcagttttgtgatggatcacgtttttattgaccaagacgaggagaaccagagcatggagggtgatgaagaagatgaagctaataaaattgaggccttacataaaagaaggaatctacttgctgctttcagcaaacttatcatttatgacattgttgacatgcatgcagctgcagacatcttcaaacactacatgaagtattacaatgactatggtgatattattaaggaaacactgagtaaaaccaggcagattgataaaattcagtgtgccaagactctcattctcagtttgcaacagttatttaatgaacttgttcaagagcaaggtcccaacctagataggacatctgcccatgtcagtggcattaaagaactggcacgtcgctttgcccttacatttggattggaccagattaagacacgagaagcagttgccacacttcacaaggatggcatagagtttgcatttaaataccaaaatcagaaaggacaagagtatccacctcctaatctggcttttcttgaagtactaagtgaattttcttctaaacttcttcgacaggacaaaaagacagttcattcatacctagagaaattccttaccgagcagatgatggaaaggagggaggatgtatggcttccactcatctcctatagaaattcattagtcactgggggtgaagatgatagaatgtctgtgaacagtggaagtagcagcagcaaaacctcatcagtaaggaataagaaaggacgacctccacttcataaaaaacgagtagaagatgagagtctggataacacatggctaaacaggactgacaccatgattcagactcctggccccctgccagcaccacaactcacatccactgtactgcgggagaacagtcggcccatgggagaccagattcaagaacctgagtctgaacatggttctgaaccagactttttacacaatcctcagatgcagatctcttggttaggccagccgaagttagaagacttaaatcggaaggacagaacaggaatgaactacatgaaagtgagaactggagtgaggcatgctgttcggggtctaatggaggaagatgctgagcccatctttgaagatgtgatgatgtcatcccgaagccagttagaagatatgaatgaagaatttgaggacaccatggttattgatctgcctccatcaagaaatcggcgagagagagctgagctaaggccagacttctttgactctgcagctatcatagaagatgattcaggatttggaatgcctatgttctga

SEQ ID NO: 370 - DNA, 849 bp, Homo Sapiens
atggcattgaagcagatttccagcaacaagtgctttgggggattgcagaaagtttttgaacatgacagtgttgaactaaactgcaaaatgaaatttgctgtctacttaccaccaaaggcagaaacaggaaagtgccctgcactgtattggctctcaggtttaacttgcacagagcaaaattttatatcaaaatctggttatcatcagtctgcttcagaacatggtcttgttgtcattgctccagataccagccctcgtggctgcaatattaaaggtgaagatgagagctgggactttggcactggtgctggattttatgttgatgccactgaagatccttggaaaaccaactacagaatgtactcttatgtcacagaggagcttccccaactcataaatgccaattttccagtggatccccaaaggatgtctatttttggccactccatgggaggtcatggagctctgatctgtgctttgaaaaatcctggaaaatacaaatctgtgtcagcatttgctccaatttgcaaccctgtactctgtccctggggcaaaaaagcctttagtggatatttgggaacagatcaaagtaaatggaaggcttatgatgctacccaccttgtgaaatcctatccaggatctcagctggacatactaattgatcaagggaaagatgaccagtttcttttagatggacagttactccctgataacttcatagctgcctgtacagaaaagaaaatccccgttgtttttcgattgcaagagggttatgatcatagctactacttcattgcaacctttattactgaccacatcagacatcatgctaaatacctgaatgcatga

SEQ ID NO: 371 - DNA, 2685 bp, Homo Sapiens
atgaaccagatagagcccggcgtgcagtacaactacgtgtacgacgaggatgagtacatgatccaggaggaggagtgggaccgcgacctgctcctggacccagcctgggagaagcagcagaggaagaccttcactgcctggtgtaactcccacctaaggaaagccggcacccagattgagaacatcgaggaagacttcaggaatggccttaagctcatgctgcttttggaagtcatctcaggggaaaggctgcccaaacctgaccggggaaaaatgcggttccacaaaattgctaatgtcaacaaagctttggattacatagccagcaaaggggtgaaactggtgtccatcggcgctgaagaaattgttgatggcaatgtgaaaatgaccctgggtatgatctggaccatcatccttcgctttgctattcaggatatttcggttgaagaaacatctgccaaagaaggtctgctgctttggtgtcagaggaaaactgctccttatagaaatgtgaacattcagaacttccatactagctggaaagatggccttggactctgtgccctcatccaccgacaccggcctgacctcattgactactcaaagcttaacaaggatgaccccataggaaatattaacctggccatggaaatcgctgagaagcacctggatattcctaaaatgttggatgctgaagacatcgtgaacacccctaaacccgatgaaagagccatcatgacgtacgtctcttgcttctaccacgcttttgcgggcgcggagcaggccgagacagcggctaacaggatatgtaaggttcttgctgtgaatcaagagaatgagaggctgatggaagaatatgagaggctagcgagtgagcttttggaatggattcgtcgcacgatcccctggctggagaaccggactcccgagaagaccatgcaagccatgcagaagaagctggaggacttccgggattaccgccggaagcacaagccacccaaggtgcaggagaaatgccagctggagatcaacttcaacacgctgcagaccaagctgcggatcagcaaccgtcctgccttcatgccctccgagggcaagatggtgtcggatattgctggtgcctggcagaggctggagcaggctgagaagggttacgaggagtggttgctcaatgagattcggagactggagcgcttggaacacctggctgagaagttcaggcagaaggcctcaacgcacgagacttgggcttatggcaaagagcagatcttgctgcagaaggattacgagtcggcgtcgctgacagaggtgcgggctctgctgcggaagcacgaggcgttcgagagcgacctggcagcgcaccaggaccgcgtggagcagatcgcagccatcgcgcaggagctcaatgaactggactatcacgacgctgtgaatgtcaatgatcggtgccagaaaatttgtgaccagtgggaccgactgggaacgcttactcagaagaggagagaagccctagagagaatggagaaattgctagaaaccattgatcagcttcacctggagtttgccaagagggctgctcctttcaacaattggatggagggcgctatggaggatctgcaagatatgttcattgtccacagcattgaggagatccagagtctgatcactgcgcatgagcagttcaaggccacgctgcccgaggcggacggagagcggcagtccatcatggccatccagaacgaggtggagaaggtgattcagagctacaacatcagaatcagctcaagcaacccgtacagcactgtcaccatggatgagctccggaccaagtgggacaaggtgaagcaactcgtgcccatccgcgatcaatccctgcaggaggagctggctcgccagcatgctaacgagcgtctgaggcgccagtttgctgcccaagccaatgccattgggccctggatccagaacaagatggaggagattgcccggagctccatccagatcacaggagccctggaagaccagatgaaccagctgaagcagtatgagcacaacatcatcaactataagaacaacatcgacaagctggagggagaccatcagctcatccaggaggcccttgtctttgacaacaagcacacgaactacacgatggagcacattcgtgttggatgggagctgctgctgacaaccatcgccagaaccatcaatgaggtggagactcagatcctgacgagagatgcgaagggcatcacccaggagcagatgaatgagttcagagcctccttcaaccactttgacaggaggaagaatggcctgatggatcatgaggatttcagagcctgcctgatttccatgggttatgacctgggtgaagccgaatttgcccgcattatgaccctggtagatcccaacgggcaaggcaccgtcaccttccaatccttcatcgacttcatgactagagagacggctgacaccgacactgccgagcaggtcatcgcctccttccggatcctggcttctgataagccatacatcctggcggaggagctgcgtcgggagctgcccccggatcaggcccagtactgcatcaagaggatgcccgcctactcgggcccaggcagtgtgcctggtgcactggattacgctgcgttctcttccgcactctacggggagagcgatctgtga

SEQ ID NO: 372 - DNA, 1770 bp, Homo Sapiens
atgtacagatggctggttaggattctcggcaccattttccgtttctgcgaccggtcggtgccccctgcccgggccctcctgaagaggcggcgctcagacagcactctgttttctacagtggacactgatgaaataccagccaaaagaccaagattagattgctttattcaccaagtgaaaaacagtctctacaatgctgccagcttatttggattcccattccagctgaccacaaagcccatggtaacttctgcttgtaatggaacacggaatgtggccccttcaggagaggtattttcgaactcttcatcttgtgaactgacaggttctggatcctggaacaacatgctgaaactgggtaataaatctcctaatggaataagtgactatccaaagatcagagtgacagttacccgagatcagccacgcagagtcctgccttcctttggttttactttgaactcagaaggctgtaatagaagaccaggtggccgtcgccatagcaaaggtaatccagagagttctttaatgtggaaacctcaggaacaggctgtaacagagatgatttctgaagagagtggcaagggtctgaggcgtccccattgtactgtggaggagggtgttcaaaaagaggaaagagagaagtaccgaaagttattggaacgacttaaagaaagtggtcatggaaactctgtctgtcctgtaacttcaaattatcacagttctcaaagaagtcagatggacacattaaagaccaaaggctggggggaagagcaaaatcacggagtcaaaacaactcagtttgttccaaaacaatatagacttgttgaaacaaggggacctctatgttcattgagaagtgaaaagaggtgttcaaaggggaaaattactgatacagagacgatggtcggaatcagatttgaaaatgaaagtaggaggggataccaactggagcctgacctatcagaagaagtgtcggcccgactccgcctgggcagtggaagcaatggcttactcaggaggaaagtgtcaataattgagacaaaggaaaagaattgctcaggcaaagagagggacagaagaacggacgatctccttgaacttacagaggacatggaaaaggaaatcagtaatgccctaggccatggcccacaggatgaaatcctaagtagtgctttcaaattgcgaattactcgaggagatattcagacattaaagaactatcactggctcaatgatgaagtcattaatttttacatgaatcttctggtggaaagaaataaaaagcaaggctatccagcacttcatgtattcagtactttcttctatcctaaattaaagtctgggggttaccaagcagtgaaacgatggaccaaaggggtaaatctctttgaacaagaaattattctggtgcctattcatcggaaggtacattggagcctggtggtgattgacctaagaaaaaagtgtcttaaatatctggattctatgggacaaaagggccacaggatctgtgagattctccttcagtatttacaggatgaaagtaagaccaaaagaaatagtgatctgaatcttttagagtggacccatcacagcatgaaaccacacgagattcctcaacagctgaatgggagtgattgtggaatgtttacttgtaaatatgcagattatatttctagggacaaacctatcacatttactcagcaccagatgcctctcttccggaagaagatggtgtgggaaatccttcatcagcagttgctgtga

SEQ ID NO: 373 - DNA, 1323 bp, Homo Sapiens
atgatggctgatgaagaggaagaagtcaagccgatcttgcagaaattgcaggaactcgtggatcagctctactcatttcgagactgctatttcgagacacatagtgttgaggatgctgggaggaagcaacaggatgtgcagaaggagatggagaaaaccctacagcagatggaagaagtagtgggttctgtccagggcaaggcacaagttctaatgctaactgggaaagcactaaatgtgactcctgactatagccctaaggctgaggagcttctgtcaaaggctgtgaagctggagcccgagctggtggaagcctggaaccagctgggtgaggtgtactggaaaaaaggggatgttgcagctgcccacacctgcttctcaggagccctcacccattgcaggaacaaagtctccttgcaaaacctgtcaatggtgcttcgtcagctgcggactgacactgaagatgaacattctcaccatgtcatggacagtgtccgacaggctaagttggctgttcagatggatgtccatgatggccgctcctggtatattcttgggaattcatatctttccctttacttctctactggccagaaccctaagatctcccagcaagccctcagtgcctatgcccaagcagagaaagttgacagaaaagcttctagcaatcctgaccttcatctgaacagggcgacgttgcataaatatgaagagagttatggggaggccctggagggcttctctcgggctgcagccctggaccctgcctggccagagccccggcaacgagagcaacaacttctggaattcctggatagattaaccagcctccttgagagtaagggaaaggtgaagaccaaaaagctgcagagcatgctgggaagcttgcgcccagcccatctaggcccttgcagtgatgggcactatcagtcagcctctgggcagaaagtgaccctggagctcaagccactgagtacgcttcagcctggggtgaacagcggtgccgtcatcctgggaaaggtggtatttagcctcaccacagaggagaaagtcccctttacatttggcctggtagattcagatggaccttgctatgcagtgatggtgtacaatatagtgcagagctggggagtgctcattggagactctgtagccattcctgagcccaacctgcggcttcaccgaattcagcacaaaggaaaggactattccttttccagtgttcgagtggagacgcccctcctgctagtggtgaatgggaagcctcagggatccagcagccaggctgttgccacagtggcatcgcgaccacagtgtgaatga

SEQ ID NO: 374 - DNA, 852 bp, Homo Sapiens
atgtgtaacacaccaacgtactgtgacctaggaaaggctgctaaggatgtcttcaacaaaggatatggctttggcatggtcaagatagacctgaaaaccaagtcttgtagtggagtggaattttctacttctggtcatgcttacactgatacagggaaagcatcaggcaacctagaaaccaaatataaggtctgtaactatggacttaccttcacccagaaatggaacacagacaatactctagggacagaaatctcttgggagaataagttggctgaagggttgaaactgactcttgataccatatttgtaccgaacacaggaaagaagagtgggaaattgaaggcctcctataaacgggattgttttagtgttggcagtaatgttgatatagatttttctggaccaaccatctatggctgggctgtgttggccttcgaagggtggcttgctggctatcagatgagttttgacacagccaaatccaaactgtcacagaataatttcgccctgggttacaaggctgcggacttccagctgcacacacatgtgaacgatggcactgaatttggaggttctatctaccagaaggtgaatgagaagattgaaacatccataaaccttgcttggacagctgggagtaacaacacccgttttggcattgctgctaagtacatgctggattgtagaacttctctctctgctaaagtaaataatgccagcctgattggactgggttatactcagacccttcgaccaggagtcaaattgactttatcagctttaatcgatgggaagaacttcagtgcaggaggtcacaaggttggcttgggatttgaactggaagcttaa

SEQ ID NO: 375 - DNA, 1164 bp, Homo Sapiens
atggcttgtaccatccaaaaggcagaagcacttgacggggctcatttgatgcagatcctctggtatgatgaggaagagtctctctacccagctgtatggttgagagacaactgtccgtgctctgattgctacctggattctgcaaaagcacggaaacttctagtggaagctcttgatgtgaacattggaattaaaggcttgatatttgacagaaaaaaggtgtacatcacatggcccgatgagcattacagtgaattccaggctgattggctgaagaaaagatgcttttccaagcaggccagagcaaagctccaaagagaattgttttttccagaatgccaatactggggctcagagctccagctacccactttggattttgaagatgttttaagatatgatgaacacgcatacaagtggctctccaccctcaagaaagtaggcatagtaagactcaccggagcatctgacaaaccaggagaagtttcaaaacttgggaaaaggatgggtttcctctatctcacattttatggacatacttggcaagtgcaagacaaaatcgatgcaaacaatgtggcttacacaactgggaagctaagctttcacactgattatccagccctccatcatccacctggggttcagcttcttcactgcataaagcaaacagtcacagggggtgattcagaaattgtagatgggtttaatgtgtgccaaaaactaaagaaaaataatcctcaggcattccagattttgtcctctacctttgtggactttacagacattggagtggattactgtgatttttctgtacaatcaaaacataaaattatagagttagatgataaaggccaagtggttcgcatcaacttcaataacgcaactagggacacaatatttgatgtgcctgttgaaagagttcagcctttttatgctgctctgaaggagtttgttgacctcatgaacagcaaagaatccaagtttaccttcaagatgaatccaggtgatgtgattacttttgataactggcgcttacttcatggccgacgtagctatgaagcaggaactgagatatcccgccatctagaaggagcttatgctgactgggatgtggtcatgtcaaggcttcgtatcttaaggcagagggtggagaatggaaactga

SEQ ID NO: 376 - DNA, 1479 bp, Homo Sapiens
atgaacaggattcggattcacgtcttgccaaccaatcgggggaggatcactccagtgcccaggtctcaggaacctctgtcttgtgcattcactcatcgtccatgctctcaccctcgtctggaggggcaggagttttgcattaagcatatccttgaagacaagaatgcacccttcaagcagtgtagttatatatcgacgaagaatggaaaaagatgtcccaatgctgccccaaagccagagaagaaagatggggtgtccttctgtgctgaacatgtccgtaggaatgccctggcacttcatgctcaaatgaagaagaccaacccagggcctgtgggtgaaacactcctgtgccagctgagctcatatgctaagacagagctggggtctcagactccagaaagtagtcgcagtgaagccagccgaatactagatgaagacagctggagtgatggggagcaggaacccattactgtggatcagacatggagaggtgaccctgacagtgaagctgatagcatagacagtgatcaagaagatcccctaaaacatgctggtgtctacacagcagaagaagtggccctgattatgcgtgaaaagctaattcgtttgcagtcgttgtatattgatcagtttaaacgacttcagcatctgctcaaggagaagaagcgccgatacttacataatcgcaaagtggaacatgaagctctaggcagtagtctcctgactggcccagagggacttttggccaaagaacgagagaacttaaagcgattaaaatgtctgcgacgataccgccagcgctatggagtggaagccttactgcataggcagttgaaggaacggagaatgctggccacagatggtgctgcccaacaggcccataccactcgttccagtcagaggtgcttggcctttgtggatgatgttcgttgttccaatcagtctcttccaatgaccagacactgccttacccatatttgtcaggatacgaatcaggttctcttcaagtgctgccagggatctgaagaggtaccctgcaacaaacctgttcctgtaagcctctctgaggatccctgctgcccactgcatttccagttgcctcctcagatgtataagcccgagcaggtactgtctgtgccagacgatctggaagccggccccatggatctgtacttgagtgctgctgagcttcagcccactgagagtttacctctggagttcagtgatgacttggatgttgtgggtgatggtatgcagtgtcctccttcacctttgctttttgatccttcactaacccttgaagatcatttagtcaaagaaattgctgaagacccagtggatattttgggccagatgcagatggctggagatgggtgcagatcccagggatctcgaaattctgagaaagcctctgcaccattgtctcagagtggattggctactgcaaatgggaagccagaacccacttctattagttga

SEQ ID NO: 377 - DNA, 1128 bp, Homo Sapiens
atgatggaagacgacgggcagccccggactctatacgtaggtaacctttccagagatgtgacagaagtccttatacttcagttgttcagtcagattggaccctgtaaaagctgtaaaatgataacagagcatacaagcaatgacccatattgctttgtggaattttatgaacacagagatgcagctgctgcattagctgctatgaatgggagaaaaattttgggaaaggaggtcaaagtaaactgggcaaccacaccaagtagccagaaaaaagatacttccaatcacttccatgtgtttgttggggatttgagtccagaaattacaacagaagatatcaaatcagcatttgccccctttggtaaaatatcggatgcccgggtagttaaagacatggcaactggaaaatccaaaggctatggttttgtatctttttataacaaactggatgcagaaaatgcgattgtgcatatgggcggtcagtggttgggtggtcgtcaaatccgaaccaattgggccactcgtaaaccacctgcacctaaaagtacacaagaaaacaacactaagcagttgagatttgaagatgtagtaaaccagtcaagtccaaaaaattgtactgtgtactgtggaggaattgcgtctgggttaacagatcagcttatgagacagacattctcaccatttggacaaattatggaaataagagttttcccagaaaagggctattcatttgtcagattttcaacccatgaaagtgcagcccatgccattgtttcggtgaacggtactacgattgaaggacatgtggttaaatgctattggggtaaagaatctcctgatatgactaaaaacttccaacaggttgactatagtcaatggggccaatggagccaagtgtatggaaacccacaacagtatggacagtatatggcaaatgggtggcaagtaccgccttatggagtatacgggcaaccatggaatcaacaaggatttggagtagatcaatcaccttctgctgcttggatgggtggatttggtgctcagcctccccaaggacaagctcctccccctgtaatacctcctcctaaccaagccggatatggtatggcaagttaccaaacacagtga

SEQ ID NO: 378 - DNA, 1056 bp, Homo Sapiens
atggtcatcatgggccagtgctactacaacgagaccatcggcttcttctataacaacagtggcaaagagctcagctcccactggcggcccaaggatgtggtcgtggtggcactggggctgaccgtcagcgtgctggtgctgctgaccaatctgctggtcatagcagccatcgcctccaaccgccgcttccaccagcccatctactacctgctcggcaatctggccgcggctgacctcttcgcgggcgtggcctacctcttcctcatgttccacactggtccccgcacagcccgactttcacttgagggctggttcctgcggcagggcttgctggacacaagcctcactgcgtcggtggccacactgctggccatcgccgtggagcggcaccgcagtgtgatggccgtgcagctgcacagccgcctgccccgtggccgcgtggtcatgctcattgtgggcgtgtgggtggctgccctgggcctggggctgctgcctgcccactcctggcactgcctctgtgccctggaccgctgctcacgcatggcacccctgctcagccgctcctatttggccgtctgggctctgtcgagcctgcttgtcttcctgctcatggtggctgtgtacacccgcattttcttctacgtgcggcggcgagtgcagcgcatggcagagcatgtcagctgccacccccgctaccgagagaccacgctcagcctggtcaagactgttgtcatcatcctgggggcgttcgtggtctgctggacaccaggccaggtggtactgctcctggatggtttaggctgtgagtcctgcaatgtcctggctgtagaaaagtacttcctactgttggccgaggccaactcactggtcaatgctgctgtgtactcttgccgagatgctgagatgcgccgcaccttccgccgccttctctgctgcgcgtgcctccgccagtccacccgcgagtctgtccactatacatcctctgcccagggaggtgccagcactcgcatcatgcttcccgagaacggccacccactgatggactccaccctttag

SEQ ID NO: 379 - DNA, 576 bp, Homo Sapiens
atggggaagaccaacagcaagctggcccccgaggtgctggaggaccttgttcagaacactgagttcagcgagcaggagctgaagcagtggtacaagggcttcctgaaggactgccccagcggcatcctcaacctggaggagtttcagcagctctacatcaagttcttcccctacggcgacgcctccaagttcgcgcagcacgctttccgcaccttcgacaagaacggcgacggcaccatcgacttccgggagttcatctgcgccctgtcggtcacctcccgcggcagcttcgagcagaagctcaactgggcctttgagatgtacgacctggacggcgacgggcgcatcacgcgcctggagatgctggagatcatcgaggcaatctacaagatggtgggcaccgtgatcatgatgcgcatgaaccaggacgggctcacgccccagcagcgtgtggacaagatcttcaagaagatggaccaggataaggacgaccagattacattggaggagttcaaggaggcagccaagagtgacccatccattgtgttgctgctgcagtgtgacatgcagaagtag

SEQ ID NO: 380 - DNA, 348 bp, Homo Sapiens
atgagccggcacagccggctgcagaggcaggttctgagcctgtaccgcgatctgctgcgcgccgggcgtgggaagccgggcgccgaggcgcgagtgcgggcagagttccggcagcatgcgggcctgccgcggtccgacgtgctgcgcatcgagtacctgtaccgccgcgggcggcgccagctgcagctgctacgctcgggccacgccaccgccatgggcgccttcgtacgcccgcgggccccgaccggggagcctggcggcgtgggttcccagcctgacgacggcgacagtccaaggaacccccacgacagcacgggggcaccggagacccgccccgacggacggtga

SEQ ID NO: 381 - DNA, 1830 bp, Homo Sapiens
atggagtccacagcctaccctctcaatttgagcctgaaagaagaggaagaggaagaagagattcagagccgggaactagaggacggcccggcagacatgcagaaagtacgaatctgctctgagggcggatgggtaccggccctatttgatgaggtggccatatatttttccgatgaggaatgggaagttttgacggagcaacaaaaggccctctaccgggaagtcatgaggatgaattatgaaactgtcctgtccctggaattcccattccctaagccagacatgatcacccgtttggaaggggaggaggagtctcagaattctgacgagtggcagctccaaggaggcacctctgcagaaaatgaagaatctgacgtaaagcctccagactggccaaacccaatgaatgctacctcccagtttcctcagcctcagcactttgacagctttggcctccgtctgcctcgggatatcacagagctgcccgagtggagtgaggggtaccccttctacatggccatgggcttcccagggtatgacctctcggctgatgacatagctgggaagtttcagttcagccggggcatgcgccgcagttacgacgcagggttcaagctgatggtagtggaatatgctgagagtaccaacaactgccaggctgccaagcagtttggagtattggaaaaaaacgttcgagactggcgcaaagtgaagccacagcttcaaaacgcccacgccatgcggcgggcattccgaggccccaagaatgggaggtttgctctggtggaccagcgtgtggccgaatatgtcagatacatgcaggccaaaggggaccccatcacccgggaggcgatgcagctgaaagctctcgaaatcgcccaggaaatgaacattccagagaaagggttcaaggcaagcttgggttggtgtcgaagaatgatgagaaggtatgacctgtctctgaggcataaagtgcccgtgccccagcacctgccggaagacctgactgagaaactcgtcacttaccagcgcagtgtcctggctctgcgcagggcgcatgactatgaggtagctcagatggggaatgcagatgagacgcccatttgtttagaggtgccatcacgggtaactgttgataaccagggcgaaaagcctgtcttggtcaagacaccaggcagggaaaaactgaaaatcacagcaatgcttggtgtcttggctgatgggaggaagttaccaccgtacatcattttgaggggaacatatatccccccggggaagtttcccagtgggatggaaattcgctgccaccggtatgggtggatgactgaagacttgatgcaggactggttggaagtggtgtggagacggaggacaggagcagtgcccaagcagcgagggatgctgatcttgaatggcttccggggccatgccacagattccgtgaagaactccatggaaagcatgaacactgacatggtgatcatcccagggggtctgacctcacagcttcaggtgctggatgtcgtggtctacaagccactgaatgacagtgtgcgggcccagtactccaactggcttctggctgggaacctggcgctgagcccaaccgggaatgctaagaagccacccctgggcctctttctggagtgggtcatggtcgcgtggaatagcatctcaagtgagtccatcgtccaagggttcaagaagtgccatatctccagcaacttggaggaggaagacgatgtcctgtgggaaatcgagagtgagttgccaggaggaggagaaccaccaaaagattgtgacaccgaaagcatggctgagagcaactga

SEQ ID NO: 382 - DNA, 711 bp, Homo Sapiens
atgggagtggagggctgcaccaagtgcatcaagtacctgctcttcgtcttcaatttcgtcttctggctggctggaggcgtgatcctgggtgtggccctgtggctccgccatgacccgcagaccaccaacctcctgtatctggagctgggagacaagcccgcgcccaacaccttctatgtaggcatctacatcctcatcgctgtgggcgctgtcatgatgttcgttggcttcctgggctgctacggggccatccaggaatcccagtgcctgctggggacgttcttcacctgcctggtcatcctgtttgcctgtgaggtggccgccggcatctggggctttgtcaacaaggaccagatcgccaaggatgtgaagcagttctatgaccaggccctacagcaggccgtggtggatgatgacgccaacaacgccaaggctgtggtgaagaccttccacgagacgcttgactgctgtggctccagcacactgactgctttgaccacctcagtgctcaagaacaatttgtgtccctcgggcagcaacatcatcagcaacctcttcaaggaggactgccaccagaagatcgatgacctcttctccgggaagctgtacctcatcggcattgctgccatcgtggtcgctgtgatcatgatcttcgagatgatcctgagcatggtgctgtgctgtggcatccggaacagctccgtgtactga

SEQ ID NO: 383 - DNA, 651 bp, Homo Sapiens
atgcaggcggggaagcccatcctctattcctatttccgaagctcctgctcatggagagttcgaattgctctggccttgaaaggcatcgactacgagacggtgcccatcaatctcataaaggatgggggccaacagttttctaaggacttccaggcactgaatcctatgaagcaggtgccaaccctgaagattgatggaatcaccattcaccagtcactggccatcattgagtatctagaggagatgcgtcccactccgcgacttctgcctcaggacccaaagaagagggccagcgtgcgtatgatttctgacctcatcgctggtggcatccagcccctgcagaacctgtctgtcctgaagcaagtgggagaggagatgcagctgacctgggcccagaacgccatcacttgtggctttaacgccctggagcagatcctacagagcacagcgggcatatactgtgtaggagacgaggtgaccatggctgatctgtgcttggtgcctcaggtggcaaatgctgaaagattcaaggtggatctcaccccctaccctaccatcagctccatcaacaagaggctgctggtcttggaggccttccaggtgtctcacccctgccggcagccagatacacccactgagctgagggcctag

SEQ ID NO: 384 - DNA, 4635 bp, Homo Sapiens
atggaggcggccaccacactgcacccaggcccgcgcccggcgctgcccctcgggggcccgggcccgctgggcgagttcctgcctccacccgagtgcccggtcttcgaacccagctgggaagagttcgcggaccccttcgctttcatccacaagatccggcccatagccgagcagactggcatctgtaaggtgcggccgccgccggattggcagccaccatttgcatgtgatgttgataaacttcattttacgccacgtatccagagactgaatgaattggaggcccaaactcgtgtaaaattgaatttcttggaccagattgcaaagtactgggagttacagggaagtactctgaaaattccacatgtggagaggaagatcttggacttatttcagcttaataagttagttgcagaagaaggtggatttgcagttgtttgcaaggatagaaaatggaccaaaattgctaccaagatggggtttgctcctggcaaagcagtgggctcacatatcagagggcattatgaacgaattctcaacccctacaacttattcctgtccggagacagcctaaggtgtttgcagaagccaaacctgaccacagacactaaggacaaggagtacaaaccccatgatattccccagaggcagtctgtgcagccttcggaaacgtgccccccagcccgacgagcaaaacgcatgagagcagaggccatgaatattaaaatagaacccgaggagacaacggaagccagaactcataatctgagacgtcgaatgggttgtccaactccaaaatgtgaaaatgagaaagaaatgaagagtagcatcaagcaagaacctattgagaggaaagattatattgtagaaaatgagaaggaaaagcccaagagtcgatctaaaaaagccaccaatgctgtggacctgtatgtctgtcttttatgtggcagtggcaatgatgaagaccggctactgttgtgtgatggctgtgatgacagttaccataccttttgcttgatcccacctctccatgatgttcccaagggagactggaggtgtcctaagtgtttggctcaggaatgtagtaagccacaagaagcatttggctttgaacaagcagccagggactataccctccgtacttttggggaaatggcagatgcgttcaaatctgattacttcaacatgccagtccatatggtccccacagagcttgttgagaaagaattttggagactagtaagcactattgaggaggatgtcacagtggaatatggagctgacattgcctcaaaggaatttggcagtggctttcctgtccgagatgggaaaatcaaactctcacctgaggaagaggagtatcttgatagtggctggaatttgaacaacatgccagtgatggagcagtctgtccttgcacatattactgctgatatatgtggcatgaaacttccttggttgtatgtgggaatgtgcttttcttcattctgttggcacattgaagaccactggagctattcaattaactacttgcactggggtgagccaaaaacctggtatggagtcccagggtatgctgctgagcagctagaaaatgtaatgaagaaactagctccagaactctttgtgtcccagccggatctcctccatcagcttgtgaccatcatgaaccccaataccctgatgactcatgaagtgcctgtttaccgaactaatcagtgtgctggggagtttgtgattacatttccaagagcctaccacagtggttttaaccagggttttaattttgctgaggctgttaacttctgcactgttgattggctgccattaggccgacagtgtgtggagcattatcgcttgcttcatcgatattgtgtgttttcccacgatgagatgatctgcaagatggcttccaaggctgatgtattagatgttgtagtggcttcaactgttcagaaagacatggccattatgattgaggatgagaaagctttaagagaaactgtccgtaaattgggagtgattgattcggaaagaatggattttgagctgttgccagatgatgaacgtcagtgtgtaaaatgcaaaactacatgcttcatgtctgccatctcctgttcttgtaaacctggccttcttgtttgcctgcatcatgtaaaagaattgtgttcctgtcctccttacaaatataaattgcggtataggtacacgctggatgatctctaccctatgatgaatgcattgaagcttcgagcagaatcttacaacgaatgggccttgaatgtgaatgaagctttggaggcaaagatcaacaagaagaaaagccttgtcagcttcaaggctttaattgaagaatctgaaatgaagaaattcccagacaatgatcttttgcgacaccttcgcctagtcacacaggatgcagagaagtgtgcctctgttgcgcagcagttgcttaatggcaaaaggcaaactagatatcgatctggtggagggaaatcccaaaatcagttgacagtgaatgagctccggcagtttgtaacacagctgtatgctcttccatgtgtcctcagtcagacaccattactaaaggatctcttgaatcgtgtagaagattttcaacagcatagtcagaaactactctctgaggaaacgcctagtgctgcggagctgcaggacttgctagatgtcagctttgaatttgatgttgaacttccacagcttgctgagatgcgtatccgtttggaacaagcccgttggctagaagaggtgcagcaagcttgcctagaccccagctcccttactttagatgatatgagacgtctcatagacctaggggtagggctggccccgtattcagcagtggagaaagctatggcccggctgcaggaactgctcacagtgtcagagcactgggacgacaaagccaagagtctcctcaaggccaggccacgacattcattgaatagccttgctacggcagtaaaggaaatcgaagagatccctgcatatctgcccaatggtgcggctctgaaagactcagtgcagagagccagagactggcttcaggatgtagagggcctgcaggctggaggacgtgtgccagtgttagacacactcatagaacttgttacacgaggccgatctatccccgtacatctgaattctttgccaagactggaaaccctagtagctgaggttcaggcttggaaagaatgtgctgttaatacattcttgactgagaattctccatattctctcttagaggtgctgtgtcctcgatgtgatattggccttttgggattgaaaaggaagcagagaaagttaaaggagcccttgccaaatggaaagaaaaaaagcaccaaattagagagtctgagtgacctggagagagctttaactgaaagcaaggagactgcttcagctatggcaactcttggggaagctcgcctaagggaaatggaagccttgcagtctctcagactcgccaatgaagggaaattgctgtcgcctctccaagatgtggatataaaaatctgcctatgtcagaaggccccagctgcccctatgattcaatgtgaactctgcagggatgctttccacaccagttgtgtggcggtacccagtatttcacagggcctgcgaatctggctttgtccccattgtcggaggtcagagaaacctccattagagaaaattctgcccctgctcgcctcccttcagcgtatccgagttcgccttcctgagggagatgcacttcgatatatgattgaaagaaccgtgaactggcagcacagagcccagcaactgctttcgtcagggaatcttaaatttgtgcaagatcgagtgggctcaggactgttatatagcagatggcaagcctcagcaggacaggtgtcagacacaaacaaggtatctcaacctcctggcacaacatcattttctttgcctgatgactgggacaacagaacctcatatttgcactcccccttctcaactggacgaagttgtatccccctccatggtgttagtccagaagtgaatgaactattgatggaagcccagctgctccaggtatcccttcctgaaattcaggaactttaccagactttacttgcaaagccaagccctgctcagcagactgaccgaagctcaccagtgagacccagcagtgagaagaatgactgttgccgagggaagcgagatggaattaacagtcttgagagaaaactgaagagacgcctggaaagagagggcctctccagtgagcggtgggaacgagttaagaaaatgcggacccccaaaaagaagaaaatcaaactgagccaccccaaggacatgaacaatttcaagttagagagagagcgtagctatgaattagttcgttctgctgaaactcattccctgccctcagacacatcctattccgaacaggaagactctgaggatgaagatgccatctgcccagctgtgagctgcctgcagccagaaggagatgaggtggactgggtccagtgtgatggcagctgcaatcagtggtttcatcaggtctgtgttggtgtctccccagagatggcagagaaagaagactacatctgtgtgcgctgtactgtgaaggacgcaccaagccgaaagtaa

SEQ ID NO: 385 - DNA, 681 bp, Homo Sapiens
atgggaatcatggcagcatccaggccattgtcccgcttctgggagtggggaaagaacatcgtctgcgtggggaggaactacgcggaccacgtcagggagatgcgcagcgcggtgttgagcgagcccgtgctgttcctgaagccgtccacggcctacgcgcccgagggctcgcccatcctcatgcccgcgtacactcgcaacctgcaccacgagctggagctgggcgtggtgatgggcaagcgctgccgcgcagtccccgaggctgcggccatggactacgtgggcggctatgccctgtgcctggatatgaccgcccgggacgtgcaggacgagtgcaagaagaaggggctgccctggactctggcgaagagcttcacggcgtcctgcccggtcagcgcgttcgtgcccaaggagaagatccctgaccctcacaagctgaagctctggctcaaggtcaacggcgaactcagacaggagggtgagacatcctccatgattttttccatcccctacatcatcagctatgtttctaagatcataaccttggaagaaggagatattatcttgactgggacgccaaagggagttggaccggttaaagaaaacgatgagatcgaggctggcatacacgggctgcccaaagtctcctcagcaacacttcctgtgagactacaggaatga

SEQ ID NO: 386 - DNA, 3654 bp, Homo Sapiens
atgtttctgtacaacttaaccttgcagagagccactggcatcagctttgccattcatggaaacttttctggaaccaaacaacaagaaattgttgtttcccgtgggaagatcttggagctgcttcgcccagaccccaacactggcaaagtacataccctactcactgtggaagtattcggtgttatccggtcactcatggcctttaggctgacaggtggcaccaaagactacattgtagttggcagtgactctggtcgaattgttattttggaataccagccatctaagaatatgtttgagaagattcaccaagaaacctttggcaagagtggatgccgtcgcatcgttcctggccagttcttagctgtggatcccaaagggcgagccgttatgattagtgccattgagaaacagaaattggtgtatattttgaacagagatgctgcagcccgacttaccatttcatctcccctggaagcccacaaagcaaacactttagtgtatcatgtagttggagtagatgtcggatttgaaaatccaatgtttgcttgtctggaaatggattatgaggaagcagacaatgatccaacaggggaagcagcagctaatacccagcagacacttactttctatgagctagaccttggtttaaatcatgtggtccgaaaatacagtgaacctttggaggaacacggcaacttccttattacagttccaggagggtcagatggtccaagtggagtactgatctgctctgaaaactatattacttacaagaactttggtgaccagccagatatccgctgtccaattcccaggaggcggaatgacctggatgaccctgaaagaggaatgatttttgtctgctctgcaacccataaaaccaaatcgatgttcttctttttggctcaaactgagcagggagatatctttaagatcactttggagacagatgaagatatggttactgagatccggctcaaatattttgatactgtacccgttgctgctgccatgtgtgtgcttaaaacagggttcctttttgtagcatcagaatttggaaaccattacttatatcaaattgcacatcttggagatgatgatgaagaacctgagttttcatcagccatgcctctggaagaaggagacacattcttttttcagccaagaccacttaaaaaccttgtgctggttgatgagttggacagcctctctcccattctgttttgccagatagctgatctggccaatgaagatactccacagttgtatgtggcctgtggtaggggaccccgatcatctctgagagtcctaagacatggacttgaggtgtcagaaatggctgtttctgagctacctggtaaccccaacgctgtctggacagtgcgtcgacacattgaagatgagtttgatgcctacatcattgtgtctttcgtgaatgccaccctagtgttgtccattggagaaactgtagaagaagtgactgactctgggttcctggggaccaccccgaccttgtcctgctccttattaggagatgatgccttggtgcaggtctatccagatggcattcggcacatacgagcagacaagagagtcaatgagtggaagacccctggaaagaaaacaattgtgaagtgtgcagtgaaccagcgacaagtggtgattgccctgacaggaggagagctggtctatttcgagatggatccttcaggacagctgaatgagtacacagaacggaaggagatgtcagcagatgtggtgtgcatgagtctggccaatgtaccccctggagagcagcggtctcgcttcctggctgtggggcttgtggacaacactgtcagaatcatctccctggatccctcagactgtttgcaacctctaagcatgcaggctctcccagcccagcctgagtccttgtgtatcgtggaaatgggtgggactgagaagcaggatgagctgggtgagaggggctcgattggcttcctatacctgaatattgggctacagaacggtgtgctgctgaggactgtcttggaccctgtcactggggatttgtctgatactcgcactcggtacctggggtcccgtcctgtgaagctcttccgagtccgaatgcaaggccaggaggcagtattggccatgtcaagccgctcatggttgagctattcttaccaatctcgcttccatctcaccccactgtcttacgagacactggaatttgcatcgggttttgcctcggaacagtgtcccgagggcattgtggccatctccaccaacaccctacggattttggcattagagaagctcggtgctgtcttcaatcaagtagccttcccactgcagtacacacccaggaaatttgtcatccaccctgagagtaacaaccttattatcattgaaacggaccacaatgcctacactgaggccacgaaagctcagagaaagcagcagatggcagaggaaatggtggaagcagcaggggaggatgagcgggagctggccgcagagatggcagcagcattcctcaatgaaaacctccctgaatccatctttggagctcccaaggctggcaatgggcagtgggcctctgtgatccgagtgatgaatcccattcaagggaacacactggaccttgtccagctggaacagaatgaggcagcttttagtgtggctgtgtgcaggttttccaacactggtgaagactggtatgtgctggtgggtgtggccaaggacctgatactaaacccccgatctgtggcagggggcttcgtctatacttacaagcttgtgaacaatggggaaaaactggagtttttgcacaagactcctgtggaagaggtccctgctgctattgccccattccaggggagggtgttgattggtgtggggaagctgttgcgtgtctatgacctgggaaagaagaagttactccgaaaatgtgagaataagcatattgccaattatatctctgggatccagactatcggacatagggtaattgtatctgatgtccaagaaagtttcatctgggttcgctacaagcgtaatgaaaaccagcttatcatctttgctgatgatacctacccccgatgggtcactacagccagcctcctggactatgacactgtggctggggcagacaagtttggcaacatatgtgtggtgaggctcccacctaacaccaatgatgaagtagatgaggatcctacaggaaacaaagccctgtgggaccgtggcttgctcaatggggcctcccagaaggcagaggtgatcatgaactaccatgtcggggagacggtgctgtccttgcagaagaccacgctgatccctggaggctcagaatcacttgtctataccaccttgtctggaggaattggcatccttgtgccattcacgtcccatgaggaccatgacttcttccagcatgtggaaatgcacctgcggtctgaacatccccctctctgtgggcgggaccacctcagctttcgctcctactacttccctgtgaagaatgtgattgatggagacctctgtgagcagttcaattccatggaacccaacaaacaaaagaacgtctctgaagaactggaccgaaccccacccgaagtgtccaagaaactcgaggatatccggacccgctacgccttctga

SEQ ID NO: 387 - DNA, 1851 bp, Homo Sapiens
atggtcggccaactgagcgagggggccattgcggccatcatgcagaagggggatacaaacataaagcccatcctccaagtcatcaacatccgtcccattactacggggaatagtccgccgcgttatcgactgctcatgagtgatggattgaacactctatcctctttcatgttggcgacacagttgaaccctctcgtggaggaagaacaattgtccagcaactgtgtatgccagattcacagatttattgtgaacactctgaaagacggaaggagagtagttatcttgatggaattagaagttttgaagtcagctgaagcagttggagtgaagattggcaatccagtgccctataatgaaggactcgggcagccgcaagtagctcctccagcgccagcagccagcccagcagcaagcagcaggccccagccgcagaatggaagctcgggaatgggttctactgtttctaaggcttatggtgcttcaaagacatttggaaaagctgcaggtcccagcctgtcacacacttctgggggaacacagtccaaagtggtgcccattgccagcctcactccttaccagtccaagtggaccatttgtgctcgtgttaccaacaaaagtcagatccgtacctggagcaactcccgaggggaagggaagcttttctccctagaactggttgacgaaagtggtgaaatccgagctacagctttcaatgagcaagtggacaagttctttcctcttattgaagtgaacaaggtgtattatttctcgaaaggcaccctgaagattgctaacaagcagttcacagctgttaaaaatgactacgagatgaccttcaataacgagacttccgtcatgccctgtgaggacgaccatcatttacctacggttcagtttgatttcacggggattgatgacctcgagaacaagtcgaaagactcacttgtagacatcatcgggatctgcaagagctatgaagacgccactaaaatcacagtgaggtctaacaacagagaagttgccaagaggaatatctacttgatggacacatccgggaaggtggtgactgctacactgtggggggaagatgctgataaatttgatggttctagacagcccgtgttggctatcaaaggagcccgagtctctgatttcggtggacggagcctctccgtgctgtcttcaagcactatcattgcgaatcctgacatcccagaggcctataagcttcgtggatggtttgacgcagaaggacaagccttagatggtgtttccatctctgatctaaagagcggcggagtcggagggagtaacaccaactggaaaaccttgtatgaggtcaaatccgagaacctgggccaaggcgacaagccggactactttagttctgtggccacagtggtgtatcttcgcaaagagaactgcatgtaccaagcctgcccgactcaggactgcaataagaaagtgattgatcaacagaatggattgtaccgctgtgagaagtgcgacaccgaatttcccaatttcaagtaccgcatgatcctgtcagtaaatattgcagattttcaagagaatcagtgggtgacttgtttccaggagtctgctgaagctatccttggacaaaatgctgcttatcttggggaattaaaagacaagaatgaacaggcatttgaagaagttttccagaatgccaacttccgatctttcatattcagagtcagggtcaaagtggagacctacaacgacgagtctcgaattaaggccactgtgatggacgtgaagcccgtggactacagagagtatggccgaaggctggtcatgagcatcaggagaagtgcattgatgtga

SEQ ID NO: 388 - DNA, 945 bp, Homo Sapiens
atggccttcgtcaccaggcagttcatgcgttccgtgtcctcctcgtccaccgcctcggcctcggccaagaagataatcgtcaagcacgtgacggtcatcggcggcgggctgatgggcgccggcattgcccaggttgctgcagcaactggtcacacagtagtgttggtagaccagacagaggacatcctggcaaaatccaaaaagggaattgaggaaagccttaggaaagtggcaaagaagaagtttgcagaaaaccttaaggccggcgatgaatttgtggagaagaccctgagcaccatagcgaccagcacggatgcagcctccgttgtccacagcacagacttggtggtggaagccatcgtggagaatctgaaggtgaaaaacgagctcttcaaaaggctggacaagtttgctgctgaacatacaatctttgccagcaacacttcctccttgcagattacaagcatagctaatgccaccaccagacaagaccgattcgctggcctccatttcttcaacccagtgcctgtcatgaaacttgtggaggtcattaaaacaccaatgaccagccagaagacatttgaatctttggtagactttagcaaagccctaggaaagcatcctgtttcttgcaaggacactcctgggtttattgtgaaccgcctcctggttccatacctcatggaagcaatcaggctgtatgaacgaggtgacgcatccaaagaagacattgacactgctatgaaattaggagccggttaccccatgggcccatttgagcttctagattatgtcggactggatactacgaagttcatcgtggatgggtggcatgaaatggatgcagagaacccattacatcagcccagcccatccttaaataagctggtagcagagaacaagttcggcaagaagactggagaaggattttacaaatacaagtga

SEQ ID NO: 389 - DNA, 2571 bp, Homo Sapiens
atggctaatgaaacacagaaggttggtgccatccattttccttttcccttcacaccctattccatccaggaagacttcatggcagagctgtaccgggttttggaggctggcaagattgggatatttgagagtccaactggcactgggaagtccttaagtcttatttgtggggccctctcttggctccgtgactttgaacagaagaagcgtgaagaagaggcacgactccttgaaactggaactggccccttacatgatgagaaagatgaatccctgtgtctgtcttcttcctgcgaaggggctgcaggcaccccgaggcctgctggagaaccggcctgggttactcagtttgtgcagaagaaagaagagagggacctggtggaccgactaaaggcggagcaggccaggaggaagcagcgagaagaacgcctgcagcagctgcagcacagggtgcagctcaagtatgcagccaagcgcctgaggcaggaagaagaagaaagagagaatctcctccgcctcagcagggagatgctagagacaggcccggaggctgagcggctggagcagctggagtctggggaggaggagctggtcctcgccgaatacgagagtgatgaggagaaaaaggtggcgagcagagtggatgaggatgaggatgacctggaggaagaacacataactaagatttattactgtagtcggacacactcccagctggcccagtttgtgcatgaggtgaagaagagcccctttggcaaggatgttcggctggtctcccttggctcccggcagaacctttgtgtaaatgaagacgtgaaaagcctaggttctgtgcagcttatcaacgaccgctgtgtggacatgcagagaagcaggcacgagaagaagaaaggagctgaggaggagaagccaaagaggaggaggcaggagaagcaggcagcctgccccttctacaaccacgagcagatgggccttctccgggatgaggccctggcagaggtgaaggacatggagcagctgctggcccttgggaaggaggcccgggcctgtccctattacgggagccgccttgccatccctgcagcccagctggtggtgctgccctatcagatgctgctgcatgcggccactcggcaggccgcgggcatccggctgcaggaccaggtggtgatcatcgacgaggcgcacaacctgatcgacaccatcacgggcatgcacagcgtggaggtcagcggctcccagctctgccaggcccattcccagctgctgcagtacgtggagcgatacgggaagcgtttgaaggccaagaacctgatgtacctgaagcagatcctgtatttgctggagaaattcgtggctgtgctaggggggaacattaagcaaaatcccaatacacagagtctgtcacagacagggacggagctgaagaccatcaacgactttctcttccagagccagatcgacaacatcaacctgttcaaggtgcagcgatactgtgagaagagcatgatcagcagaaagctctttggattcactgaacggtacggagcagtgttctcatcccgggagcagcccaaactggctgggtttcagcaattcctgcagagcctgcagcccaggacgactgaagctcttgcagcccctgcagacgagagtcaggccagcaccctgcgaccagcttctccactgatgcacatccaaggcttcctggcagctctcactacggccaaccaggacggcagggtcatcctgagccgccaaggcagcctcagtcagagcaccctgaagtttttgctcctgaatccagctgtgcactttgcccaagtggtgaaggaatgccgggcagtggtcattgcggggggtaccatgcagccggtgtctgacttccggcagcagctgctggcctgtgccggggtggaagctgagcgcgtggtggagttttcctgtggtcacgtgatccctccagacaacatcctgcccctcgtcatctgcagcgggatctccaaccagccgctggaattcacgttccagaaaagagagctgcctcagatgatattccaggaacctaagagcgcacaccaggtggagcaggtgctgctggcatattccaggtgcatccaggcctgtggccaggagagaggccaggtgacaggggccctgctcctctctgtggttggaggaaagatgagtgaagggatcaacttctctgacaacctaggccggtgtgtggtgatggtgggcatgcccttccccaacatcaggtctgcagagctgcaggagaagatggcctacttggatcaaaccctccccagagcccccggccaggcacccccagggaaggctctggtggagaacctgtgcatgaaggccgtcaaccagtccataggcagggccatcaggcaccagaaggattttgccagcgtagtgctcctggaccagcgatatgcccggccccctgtcctggccaagctgccggcctggatccgagcccgtgtggaggtcaaagctacctttggccccgccattgctgctgtgcagaagtttcaccgggagaagtcggcctcttcctga

SEQ ID NO: 390 - DNA, 1041 bp, Homo Sapiens
atggctctggacgtgaagtctcgggcaaagcgttatgagaagctggacttccttggggagggacagtttgccaccgtttacaaggccagagataagaacaccaaccaaattgtcgccattaagaaaatcaaacttggacatagatcagaagctaaagatggtataaatagaaccgccttaagagagataaaattattacaggagctaagtcatccaaatataattggtctccttgatgcttttggacataaatctaatattagccttgtctttgattttatggaaactgatctagaggttataataaaggataatagtcttgtgctgacaccatcacacatcaaagcctacatgttgatgactcttcaaggattagaatatttacatcaacattggatcctacatagggatctgaaaccaaacaacttgttgctagatgaaaatggagttctaaaactggcagattttggcctggccaaatcttttgggagccccaatagagcttatacacatcaggttgtaaccaggtggtatcgggcccccgagttactatttggagctaggatgtatggtgtaggtgtggacatgtgggctgttggctgtatattagcagagttacttctaagggttccttttttgccaggagattcagaccttgatcagctaacaagaatatttgaaactttgggcacaccaactgaggaacagtggccggacatgtgtagtcttccagattatgtgacatttaagagtttccctggaatacctttgcatcacatcttcagtgcagcaggagacgacttactagatctcatacaaggcttattcttatttaatccatgtgctcgaattacggccacacaggcactgaaaatgaagtatttcagtaatcggccagggccaacacctggatgtcagctgccaagaccaaactgtccagtggaaaccttaaaggagcaatcaaatccagctttggcaataaaaaggaaaagaacagaggccttagaacaaggaggattgcccaagaaactaattttttaa

SEQ ID NO: 391 - DNA, 552 bp, Homo Sapiens
atggccgcctccatggcccggggaggcgtgagtgccagggttctactgcaggctgccaggggcacctggtggaacagacctgggggcacttccgggtcgggggagggggtggcgctggggacaaccagaaagtttcaagcgacaggctcgcgcccggctggagaggaggacgcgggcggcccggagcggcccggggacgtggtgaacgtggtgttcgtagaccgctcaggccagcggatcccagtgagtggcagagtcggggacaatgttcttcacctggcccagcgccacggggtggacctggaaggggcctgtgaagcctccctggcctgctccacctgccatgtgtatgtgagtgaagaccacctggatctcctgcctcctcccgaggagagggaagacgacatgctagacatggcccccctcctccaggagaactcgcggctgggctgccagattgtgctgacaccggagctggaaggagcggaattcaccctgcccaagatcaccaggaacttctacgtggatggccatgtccccaagccccactga

SEQ ID NO: 392 - DNA, 2067 bp, Homo Sapiens
atgtggtgcattgtcctgttttcacttttggcatgggtttatgctgagcctaccatgtatggggagatcctgtcccctaactatcctcaggcatatcccagtgaggtagagaaatcttgggacatagaagttcctgaagggtatgggattcacctctacttcacccatctggacattgagctgtcagagaactgtgcgtatgactcagtgcagataatctcaggagacactgaagaagggaggctctgtggacagaggagcagtaacaatccccactctccaattgtggaagagttccaagtcccatacaacaaactccaggtgatctttaagtcagacttttccaatgaagagcgttttacggggtttgctgcatactatgttgccacagacataaatgaatgcacagattttgtagatgtcccttgtagccacttctgcaacaatttcattggtggttacttctgctcctgccccccggaatatttcctccatgatgacatgaagaattgcggagttaattgcagtggggatgtattcactgcactgattggggagattgcaagtcccaattatcccaaaccatatccagagaactcaaggtgtgaataccagatccggttggagaaagggttccaagtggtggtgaccttgcggagagaagattttgatgtggaagcagctgactcagcgggaaactgccttgacagtttagtttttgttgcaggagatcggcaatttggtccttactgtggtcatggattccctgggcctctaaatattgaaaccaagagtaatgctcttgatatcatcttccaaactgatctaacagggcaaaaaaagggctggaaacttcgctatcatggagatccaatgccctgccctaaggaagacactcccaattctgtttgggagcctgcgaaggcaaaatatgtctttagagatgtggtgcagataacctgtctggatgggtttgaagttgtggagggacgtgttggtgcaacatctttctattcgacttgtcaaagcaatggaaagtggagtaattccaaactgaaatgtcaacctgtggactgtggcattcctgaatccattgagaatggtaaagttgaagacccagagagcactttgtttggttctgtcatccgctacacttgtgaggagccatattactacatggaaaatggaggaggtggggagtatcactgtgctggtaacgggagctgggtgaatgaggtgctgggcccggagctgccgaaatgtgttccagtctgtggagtccccagagaaccctttgaagaaaaacagaggataattggaggatccgatgcagatattaaaaacttcccctggcaagtcttctttgacaacccatgggctggtggagcgctcattaatgagtactgggtgctgacggctgctcatgttgtggagggaaacagggagccaacaatgtatgttgggtccacctcagtgcagacctcacggctggcaaaatccaagatgctcactcctgagcatgtgtttattcatccgggatggaagctgctggaagtcccagaaggacgaaccaattttgataatgacattgcactggtgcggctgaaagacccagtgaaaatgggacccaccgtctctcccatctgcctaccaggcacctcttccgactacaacctcatggatggggacctgggactgatctcaggctggggccgaacagagaagagagatcgtgctgttcgcctcaaggcggcaaggttacctgtagctcctttaagaaaatgcaaagaagtgaaagtggagaaacccacagcagatgcagaggcctatgttttcactcctaacatgatctgtgctggaggagagaagggcatggatagctgtaaaggggacagtggtggggcctttgctgtacaggatcccaatgacaagaccaaattctacgcagctggcctggtgtcctgggggccccagtgtgggacctatgggctctacacacgggtaaagaactatgttgactggataatgaagactatgcaggaaaatagcaccccccgtgaggactaa

SEQ ID NO: 393 - DNA, 1380 bp, Homo Sapiens
atggcggccagcggggctgtggaaccagggcccccgggggctgccgtcgccccgtcgcccgccccggccccgccgcctgcccctgatcacctgttccggcccatcagcgccgaggacgaggagcagcagcccaccgagatcgagtcgctatgcatgaactgttactgcaatggcatgacgcgcctcctgctcaccaagattcccttcttcagagaaataatagtgagctccttttcctgcgagcactgtggctggaacaacacggagatccagtcggcaggcaggatccaggaccagggagtgcgctacactttgtctgtcagggctctggaggacatgaacagagaagtggtgaagactgactctgctgccacaaggattcctgagctagattttgaaattcctgcctttagccagaaaggagctctgaccactgttgaaggattgatcacccgtgctatctctggcctggagcaggaccagcctgcacgaagggcaaacaaagatgctacagctgaaagaattgatgagttcattgtcaaactgaaggagctaaagcaagtagcctcccctttcactctgatcattgatgatccctcagggaacagttttgtggaaaacccacatgctcctcagaaagatgatgccctggtgatcacacactacaaccggacccgacagcaggaagagatgctggggcttcaagaagaagcaccagcagagaagccagaagaggaagatctcagaaatgaagtgctccagttcagcacaaactgcccagaatgcaatgcccccgctcagaccaacatgaagctagtacaaatccctcactttaaggaggttatcatcatggctaccaactgcgagaactgtgggcatcggaccaatgaggtgaaatctggaggagcagtagaacccttgggcaccaggatcaccctccacatcacagatgcctcagatatgaccagagacctcctcaagtctgagacttgcagtgtggaaatcccagagctagaatttgaactgggaatggcagtcctcgggggcaagttcaccacactggaagggctgctgaaagacatccgggaactggtgaccaaaaatcctttcacactgggcgacagttccaatcctggacagacggagagactacaggagtttagccagaagatggaccagatcatcgaaggtaacatgaaggcccactttattatggatgatccagcaggaaacagttacttgcagaatgtgtatgcgcctgaagatgatcctgagatgaaggtggagcgttacaagcgcacctttgaccaaaatgaggagctagggctcaatgacatgaagacagagggctatgaggcaggcctggctccgcaacggtag

SEQ ID NO: 394 - DNA, 1920 bp, Homo Sapiens
atgggagggcatttttggcccccagaaccttacacggtgtttatgtggggaagcccctgggaagcagacagtcctagggtgaagctgagaggcagagagaaggggagacagacagagggtggggctttcccccttgtctccagtgccctttctggtgaccctcggttcttttcccccaccacccccccagcggagcccatcgtggtgaggcttaaggaggtccgactgcagagggacgacttcgagattctgaaggtgatcggacgcggggcgttcagcgaggtagcggtagtgaagatgaagcagacgggccaggtgtatgccatgaagatcatgaacaagtgggacatgctgaagaggggcgaggtgtcgtgcttccgtgaggagagggacgtgttggtgaatggggaccggcggtggatcacgcagctgcacttcgccttccaggatgagaactacctgtacctggtcatggagtattacgtgggcggggacctgctgacactgctgagcaagtttggggagcggattccggccgagatggcgcgcttctacctggcggagattgtcatggccatagactcggtgcaccggcttggctacgtgcacagggacatcaaacccgacaacatcctgctggaccgctgtggccacatccgcctggccgacttcggctcttgcctcaagctgcgggcagatggaacggtgcggtcgctggtggctgtgggcaccccagactacctgtcccccgagatcctgcaggctgtgggcggtgggcctgggacaggcagctacgggcccgagtgtgactggtgggcgctgggtgtattcgcctatgaaatgttctatgggcagacgcccttctacgcggattccacggcggagacctatggcaagatcgtccactacaaggagcacctctctctgccgctggtggacgaaggggtccctgaggaggctcgagacttcattcagcggttgctgtgtcccccggagacacggctgggccggggtggagcaggcgacttccggacacatcccttcttctttggcctcgactgggatggtctccgggacagcgtgcccccctttacaccggatttcgaaggtgccaccgacacatgcaacttcgacttggtggaggacgggctcactgccatggtgagcgggggcggggagacactgtcggacattcgggaaggtgcgccgctaggggtccacctgccttttgtgggctactcctactcctgcatggccctcagggacagtgaggtcccaggccccacacccatggaactggaggccgagcagctgcttgagccacacgtgcaagcgcccagcctggagccctcggtgtccccacaggatgaaacagctgaagtggcagttccagcggctgtccctgcggcagaggctgaggccgaggtgacgctgcgggagctccaggaagccctggaggaggaggtgctcacccggcagagcctgagccgggagatggaggccatccgcacggacaaccagaacttcgccagtcaactacgcgaggcagaggctcggaaccgggacctagaggcacacgtccggcagttgcaggagcggatggagttgctgcaggcagagggagccacagctgtcacgggggtccccagtccccgggccacggatccaccttcccatctagatggccccccggccgtggctgtgggccagtgcccgctggtggggccaggccccatgcaccgccgccacctgctgctccctgccagggtccctaggcctggcctatcggaggcgctttccctgctcctgttcgccgttgttctgtctcgtgccgccgccctgggctgcattgggttggtggcccacgccggccaactcaccgcagtctggcgccgcccaggagccgcccgcgctccctga

SEQ ID NO: 395 - DNA, 1035 bp, Homo Sapiens
atgttcaccagcaccggctccagtgggctctacaaggcgcctctgtcgaagagccttctgctggtccccagtgccctctccctcctgctcgccctcctcctgcctcactgccagaagctctttgtgtatgaccttcacgcagtcaagaacgacttccagatttggaggttgatatgtggaagaataatttgccttgatttgaaagatactttctgcagtagtctgcttatttataattttaggatatttgaaagaagatatggaagcagaaaatttgcatcctttttgctgggttcctgggttttgtcagccttatttgactttctcctcattgaagctatgcagtatttctttggcatcactgcagctagtaatttgccttctggattcctggcacctgtgtttgctctgtttgtaccattttactgctccataccaagagtccaagtggcacaaattctgggtccgttgtccatcacaaacaagacattgatttatatattgggactgcagcttttcacctctggttcctacatctggattgtagccataagtggacttatgtccggtctgtgctacgacagcaaaatgttccaggtgcatcaggtgctctgcatccccagctggatggcaaaattcttttcttggacacttgaacccatcttctcttcttcagaacccaccagcgaagccagaattgggatgggagccacgctggacatccagagacagcagagaatggagctgctggaccggcagctgatgttctctcagtttgcacaagggaggcgacagagacagcagcagggaggaatgatcaattggaatcgtctttttcctcctttacgtcagcgacaaaacgtaaactatcagggcggtcggcagtctgagccagcagcgccccctctagaagtttctgaggaacaggtcgcccggctcatggagatgggattttccagaggtgatgctttggaagccctgagagcttcaaacaatgacctcaatgtcgccaccaacttcctgctgcagcactga

SEQ ID NO: 396 - DNA, 981 bp, Homo Sapiens
atggactacagccaccaaacgtccctagtcccatgtggacaagataaatacatttccaaaaatgaacttctcttgcatctgaagacctacaacttgtactatgaaggccagaatttacagctccggcaccgggaggaagaagacgagttcattgtggaggggctcctgaacatctcctggggcctgcgccggcccattcgcctgcagatgcaggatgacaacgaacgcattcgaccccctccatcctcctcctcctggcactctggctgtaacctgggggctcagggaaccactctgaagcccctgactgtgcccaaagttcagatctcagaggtggatgccccgccggagggtgaccagatgccaagctccacagactccaggggcctgaagcccctgcaggaggacaccccacagctgatgcgcacacgcagtgatgttggggtgcgtcgccgtggcaatgtgaggacgcctagtgaccagcggcgaatcagacgccaccgcttctccatcaacggccatttctacaaccataagacatccgtgttcacaccagcctatggctctgtcaccaacgtccgcatcaacagcaccatgaccaccccacaggtcctgaagctgctgctcaacaaatttaagattgagaattcagcagaggagtttgccttgtacgtggtccatacgagtggtgagaaacagaagctgaaggccaccgattacccgctgattgcccgaatcctccagggcccatgtgagcagatctccaaagtgttcctaatggagaaggaccaggtggaggaagtcacctacgacgtggcccagtatataaagttcgagatgccggtacttaaaagcttcattcagaagctccaggaggaagaagatcgggaagtaaagaagctgatgcgcaagtacaccgtgctccggctaatgattcgacagaggctggaggagatagccgagaccccagcaacaatctga

SEQ ID NO: 397 - DNA, 1719 bp, Homo Sapiens
atggagaccccgtcccagcggcgcgccacccgcagcggggcgcaggccagctccactccgctgtcgcccacccgcatcacccggctgcaggagaaggaggacctgcaggagctcaatgatcgcttggcggtctacatcgaccgtgtgcgctcgctggaaacggagaacgcagggctgcgccttcgcatcaccgagtctgaagaggtggtcagccgcgaggtgtccggcatcaaggccgcctacgaggccgagctcggggatgcccgcaagacccttgactcagtagccaaggagcgcgcccgcctgcagctggagctgagcaaagtgcgtgaggagtttaaggagctgaaagcgcgcaataccaagaaggagggtgacctgatagctgctcaggctcggctgaaggacctggaggctctgctgaactccaaggaggccgcactgagcactgctctcagtgagaagcgcacgctggagggcgagctgcatgatctgcggggccaggtggccaagcttgaggcagccctaggtgaggccaagaagcaacttcaggatgagatgctgcggcgggtggatgctgagaacaggctgcagaccatgaaggaggaactggacttccagaagaacatctacagtgaggagctgcgtgagaccaagcgccgtcatgagacccgactggtggagattgacaatgggaagcagcgtgagtttgagagccggctggcggatgcgctgcaggaactgcgggcccagcatgaggaccaggtggagcagtataagaaggagctggagaagacttattctgccaagctggacaatgccaggcagtctgctgagaggaacagcaacctggtgggggctgcccacgaggagctgcagcagtcgcgcatccgcatcgacagcctctctgcccagctcagccagctccagaagcagctggcagccaaggaggcgaagcttcgagacctggaggactcactggcccgtgagcgggacaccagccggcggctgctggcggaaaaggagcgggagatggccgagatgcgggcaaggatgcagcagcagctggacgagtaccaggagcttctggacatcaagctggccctggacatggagatccacgcctaccgcaagctcttggagggcgaggaggagaggctacgcctgtcccccagccctacctcgcagcgcagccgtggccgtgcttcctctcactcatcccagacacagggtgggggcagcgtcaccaaaaagcgcaaactggagtccactgagagccgcagcagcttctcacagcacgcacgcactagcgggcgcgtggccgtggaggaggtggatgaggagggcaagtttgtccggctgcgcaacaagtccaatgaggaccagtccatgggcaattggcagatcaagcgccagaatggagatgatcccttgctgacttaccggttcccaccaaagttcaccctgaaggctgggcaggtggtgacgatctgggctgcaggagctggggccacccacagcccccctaccgacctggtgtggaaggcacagaacacctggggctgcgggaacagcctgcgtacggctctcatcaactccactggggaagaagtggccatgcgcaagctggtgcgctcagtgactgtggttgaggacgacgaggatgaggatggagatgacctgctccatcaccaccacgtgagtggtagccgccgctga

SEQ ID NO: 398 - DNA, 921 bp, Homo Sapiens
atggcttccaattttaatgacatagtgaagcaagggtacgtgaggatccggagcagacgcctcgggatttatcagcgatgctggttagtattcaagaaagcttcaagcaaaggtccaaaaagactggagaaattttctgatgaacgtgctgcatatttcaggtgttatcataaggttacagaactcaataatgtgaagaacgtagctcgattgccaaaaagcaccaagaaacatgccatagggatttatttcaatgacgatacctccaagacttttgcttgcgaatcagatcttgaggctgatgagtggtgcaaagtactccagatggagtgtgtaggaacacggatcaatgacatcagccttggagagcctgacttactggccactggggttgagagagaacagagtgagagattcaatgtgtatttgatgccatctcctaacttagatgtacatggcgaatgtgccttgcagattacatatgagtatatctgtctttgggacgtccagaatcccagagtcaaactcatctcttggccgctaagcgccctgcggcggtatggacgtgatactacgtggttcacttttgaggcagggaggatgtgtgagactggtgaagggctgtttatctttcagacccgagacggggaggccatctatcagaaagtccactctgctgccttggccatagccgagcagcacgagcgcttgctacagagtgtgaaaaactcgatgctccagatgaagatgagtgagcgggccgcctcgctgagcaccatggtgcccctgcctcgcagcgcctactggcagcacatcacacggcagcacagcacgggacagctctaccgcttgcaagatgtttccagccctctgaagcttcatcgaacagagacttttccagcctacagatctgagcactga

SEQ ID NO: 399 - DNA, 1410 bp, Homo Sapiens
atgtctgctctgacgcctccgaccgatatgccaacccccaccactgacaagatcacacaggctgccatggagaccatctacctttgcaaattccgagtgtccatggatggagaatggctctgcctgcgagagctggatgacatctcacttacacctgacccagagcctacccatgaagatcctaattatctcatggctaatgaacgcatgaacctcatgaacatggccaagctgagtatcaagggcttgattgaatcagctctgaacctggggaggactcttgactctgactatgcacctctccagcaattctttgtggtgatggagcactgtctgaaacatggcttgaaagctaaaaaaacttttctcggacaaaataaatccttctgggggcctctagaactggtagaaaagcttgttccagaagccgcagagataacagcaagtgttaaagatcttccaggacttaagacaccagtaggtagaggaagagcctggcttcgtttggcattaatgcaaaagaaactttcagaatatatgaaagctttgatcaataagaaagaacttctcagtgaattctacgaacccaatgccctcatgatggaagaagaaggagccataattgctggtctgttggtgggtctgaatgtcattgatgccaatttctgtatgaaaggagaagacttggactctcaggttggagttatagatttttcaatgtatctcaaggacgggaacagcagtaaaggtactgaaggagacggtcagattactgcaattctggaccagaagaactatgtagaagaactgaacagacatttgaatgctactgtaaacaaccttcaggcaaaagtagatgcattagaaaaatccaacactaaactgacagaggagcttgcagttgcaaacaacaggatcattaccttacaagaagaaatggaacgagttaaagaggaaagttcctacatactggaatccaatcggaagggtcccaagcaagacagaactgcagaagggcaagcactaagtgaagcaagaaagcatttaaaagaagagacacaattacgattggatgttgagaaagaactggagatgcagatcagcatgaggcaggagatggaattggctatgaagatgctggagaaggatgtctgtgagaagcaggatgccctggtatctcttcggcagcagctggatgacctcagagctctcaagcatgaacttgcctttaagctgcagagttcagacttaggagtaaaacagaaaagtgaactaaacagtcgcttggaagagaagactaatcagatggctgctaccattaaacaacttgaacaaagtgaaaaggatttggtgaaacaggcaaagaccttaaatagtgcagcaaataaactgatcccaaaacatcattag

SEQ ID NO: 400 - DNA, 639 bp, Homo Sapiens
atggatcccctgttccagcaaacgcacaagcaggtccacgagatccagtcttgcatgggacgcctggagacggcagacaagcagtctgtgcacatagtagaaaacgaaatccaagcaagcatagaccagatattcagccgtctagaacgtctggagattttgtccagcaaggagccccctaacaaaaggcaaaatgccagacttcgggttgaccagttaaagtatgatgtccagcacctgcagactgcgctcagaaacttccagcatcggcgccatgcaagggagcagcaggagagacagcgagaagagcttctgtctcgaaccttcaccactaacgactctgacaccaccataccaatggacgaatcactgcagtttaactcctccctccagaaagttcacaacggcatggatgacctcattttagatgggcacaatattttagatggactgaggacccagagactgaccttgaaggggactcagaagaagatccttgacattgccaacatgctgggcttgtccaacacagtgatgcggctcatcgagaagcgggctttccaggacaagtactttatgataggtgggatgctgctgacctgtgtggtcatgttcctcgtggtgcagtacctgacatga

SEQ ID NO: 401 - DNA, 1470 bp, Homo Sapiens
atgaaagagttggatccaaagaatgacatttcggaagacaagctctccgttgttggggaggccacggggggacccacgaggaatggtgccaggggtcctggctcagaaggagtgtgggaaccaggcagctggccagagaggccgcggggagatgcaggtgcagagtgggagccattgggaattccccaggggaacaaactcttagggggctcagtacccgcatgtcatgaactgaaggcatttgccaaccaaggctgtgtcctggtcccaccacggctggacgaccccacagaaaagggggcctgtccacccgtaaggcgtggcaagaacttctccagcacttcagacctcagtaagccccccatgccctgcgaggagaagaaaacctacgactgcagcgagtgtggcaaggcctttagccgaagctcgtccctgataaagcaccaaaggatccacacgggagaaaagccgtttgagtgtgacacctgtgggaagcacttcatcgagcgctcgtccctcaccatccaccagcgggtgcacacgggcgagaagccctatgcctgcggggactgcggcaaggccttcagccagcgcatgaacctcactgtgcaccagcgcacgcacacgggcgagaagccgtatgtgtgcgacgtgtgtggcaaggccttccggaagacttcctctctcacccagcacgagcggatccacacgggggagaagccctacgcgtgcggggactgcggcaaggccttcagccagaacatgcacctcatcgtgcaccagcgcacgcacaccggggagaagccgtacgtgtgccccgagtgcgggcgagccttcagccagaacatgcacctgaccgagcaccagcgcacgcacaccggggagaagccgtacgcctgcaaggagtgcggcaaggccttcaacaagagctcctcgctcaccctgcaccagaggaaccacaccggcgagaagccctacgtgtgcggcgagtgcggcaaggccttcagccagagctcctacctcatccagcaccagcgcttccacatcggcgtgaagccgttcgagtgcagcgagtgcggcaaggccttcagcaagaactcctcgctcacgcagcaccagcgcatccacaccggcgagaagccctacgagtgctacatctgcaagaagcacttcacggggcgctcgtccctcatcgtgcaccagatcgtgcacaccggggagaagccctacgtgtgcggcgagtgcggcaaggccttcagccagagcgcctacctcatcgagcaccagcggatccacaccggcgagaagccgtacaggtgcggccagtgcgggaagtccttcatcaagaactcctccctcactgtgcaccagcggatccacacgggcgagaagccctaccgatgcggcgagtgcgggaagaccttcagccgcaacacgaacctgacgcgccacctgcggattcacacctga

SEQ ID NO: 402 - DNA, 3471 bp, Homo Sapiens
atgttcccagccgccccttctccgcggaccccgggtaccgggtcccgaaggggcccgctggccggactcgggcccggctccacgccccggacggctagcaggaagggtctgcccctggggtctgcagtcagctccccagtgctcttctcgccggtcggccggcgtagctcgctaagctcgcggggaacaccaacacgaatgttcccacaccactccataactgagtctgtgaactatgatgtgaaaacgtttggatcttctcttcctgttaaagtcatggaagccctaacattggctgaagtcgatgaccagctgaccattaacatagatgaaggtggatgggcttgtctggtgtgcaaagagaagctcattatttggaagattgctctgtcacctattactaagttatccgtttgcaaagaacttcagctgccacctagtgatttccactggagtgccgacttagtggctctttcttactcttctccctcaggtgaagcacattctactcaggctgttgctgtcatggttgccaccagagaaggatctatccgctattggccaagccttgctggtgaagatacctacacagaggcttttgtagattcgggaggtgataagacttacagtttcctaacagcagtgcagggaggaagttttattttgtcttcatcaggaagccaactaattcggttgatacctgagagctcaggaaagattcatcagcatatcctgcctcaggggcaaggcatgctttcaggaattggtcgaaaagtttcttctctttttggaattttatctcctagtagtgatctcacactttcaagtgttctctgggatagagagagatcaagcttttatagcctgacgagttcaaacatcagtaaatgggaattagatgattcttcagaaaagcatgcatacagttgggatataaatagagccctgaaggaaaacattaccgatgctatttggggatctgaaagtaactatgaagctattaaagaaggagtcaacattcgatatttggacttgaagcaaaactgtgatgggctggtgattttggcagcagcatggcactcagcagacaatccatgtctcatctattactctctgataacaatagaagataatggttgccaaatgtcagatgcagttactgtagaagtcactcaatataatccaccttttcagtctgaagacctgattttgtgtcagttgacggtcccaaacttttcaaaccagactgcctatctgtataacgaaagtgctgtctatgtgtgctccacaggaactgggaaattttctcttccccaggagaaaattgtctttaatgcacaaggagatagtgttttaggtgctggtgcctgtggtggtgttcctatcattttttctagaaacagtggactggtgtctattacttcaagggaaaatgtgtctatattggcagaagacttggaagggtctttagcatcttcagttgctggaccaaacagtgagagtatgatttttgagaccactacaaagaatgaaactatagcccaggaagataaaatcaagttgctgaaagctgcctttctgcaatactgcagaaaagatttaggtcatgctcaaatggtggttgatgagctcttttcctctcactctgatttggattctgattctgaactagacagggcagttacccaaatcagtgtagacctgatggatgactacccagcatctgacccacggtgggctgagtctgtccctgaggaagcacctgggttcagcaatacgtcactgattatccttcaccagctagaagacaagatgaaagctcactcttttcttatggactttattcatcaagttggcttatttggacgtctaggcagttttccagttagagggacaccgatggccactcgactgttgctctgtgagcatgccgaaaagctgtcagccgccattgttctcaagaaccaccactcccggctttctgaccttgtcaacacagccatattgattgctttgaacaagagggagtatgaaatcccatccaacctgactcctgcagatgtctttttcagggaggtatcccaagtagataccatctgtgagtgcttactggagcatgaggagcaagtcttgagggatgcacctatggattccattgaatgggctgaagtggtgatcaatgtgaacaatattctcaaggatatgctgcaggctgctagtcattatcgccaaaatagaaactctttgtatagaagagaagaatcactagaaaaagaacctgaatatgttccatggacggcaacaagtggtcctggtggcatccgaacggtaataatacgccagcatgagattgtcctgaaggtggcttatccacaggcagacagcaacctccgaaacatcgtgaccgagcagctggtagccctgatcgattgcttcctggatggttatgtttctcagcttaagtctgtggataaatccagtaatcgggaaagatatgacaatctggagatggaatacctacagaaaagatcagatctcttatctcctcttctttcactaggccagtacctgtgggctgcttctctagcagagaaatactgtgactttgatatattggtacaaatgtgtgagcagactgacaaccagagccgactccagcgctacatgacccagtttgctgatcagaatttttcagactttctcttccgttggtatctggagaaaggaaagcgaggcaaattattatctcagcccatttctcagcatggacagttggcaaattttttgcaagctcatgaacatctcagctggttacatgaaattaatagccaagaattagaaaaggctcatgcaacacttctgggtttggcaaatatggaaactcgttactttgcaaagaagaaaacccttcttggcttgagtaaattggctgcattagcttcagacttttcagaggatatgctacaagaaaaaattgaagaaatggctgagcaggagcgctttctactgcatcaggagaccctacctgaacagctgctggcggagaaacagctaaatctcagtgcgatgccagtattgactgcaccacaactcattggtctatatatctgtgaagaaaatagaagagctaatgaatatgatttcaagaaagctttggacttgttggaatatattgatgaggaagaagatataaatataaatgatctaaaactggaaatcctttgcaaagctcttcagagagataactggtccagttctgatggcaaagatgatccaattgaagtatctaaagacagtatatttgtgaagatcttacagaaacttttaaaagatggcattcagctcagtgagtacttaccggaggtgaaagacctgctacaagcggatcagcttggaagcttaaagtccaatccttacttcgagtttgttttgaaagcaaattatgaatattatgttcagggacaaatataa

SEQ ID NO: 403 - DNA, 1194 bp, Homo Sapiens
atgaatgcaggctcagatcctgtggtcatcgtctcggcggcgcggaccatcataggttccttcaatggtgccttagctgctgttcctgtccaggacctgggctccactgtcatcaaagaagtcttgaagagggccactgtggctccggaagatgtgtctgaggtcatctttggacatgtcttggcagcaggctgtgggcagaatcctgttagacaagccagtgtgggtgcaggaattccctactctgttccagcatggagctgccagatgatctgtgggtcaggcctaaaagctgtgtgccttgcagtccagtcaatagggataggagactccagcattgtggttgcaggaggcatggaaaatatgagcaaggctcctcacttggcttacttgagaacaggagtaaagataggtgagatgccactgactgacagtatactctgtgatggtcttacagatgcatttcacaactgtcatatgggtattacagctgaaaatgtagccaaaaaatggcaagtgagtagagaagatcaggacaaggttgcagttctgtcccagaacaggacagagaatgcacagaaagctggccattttgacaaagagattgtaccagttttggtgtcaactagaaaaggtcttattgaagttaaaacagatgagtttcctcgccatgggagcaacatagaagccatgtccaagctaaagccttactttcttactgatggaacgggaacagtcaccccagccaatgcttcaggaataaatgatggtgctgcagctgtcgttcttatgaagaagtcagaagctgataaacgtgggcttacacctttagcacggatagtttcctggtcccaagtgggtgtggagccttccattatgggaataggaccaattccagccataaagcaagctgttacaaaagcaggttggtcactggaagatgttgacatatttgaaatcaatgaagcctttgcagctgtctctgctgcaatagttaaagaacttggattaaacccagagaaggtcaatattgaaggaggggctatagccttgggccaccctcttggagcatctggctgtcgaattcttgtgaccctgttacacacactggagagaatgggcagaagtcgtggtgttgcagccctgtgcattgggggtgggatgggaatagcaatgtgtgttcagagagaatga

SEQ ID NO: 404 - DNA, 936 bp, Homo Sapiens
atgcagcgccccgggcccttcagcaccctctacgggcgggtcttggccccgctgcccgggagggccgggggcgcggcctccggcggaggagggaacagctgggacctcccgggttcccacgtgcggctgccggggcgtgcacagtctgggacccgtggcggtgctggcaacacaagcaccagctgcggggactccaacagcatctgcccggccccctccacgatgtccaaggccgaggaggccaagaagctggcgggccgcgcggctgtggagaaccacgtgaggaataaccaagtgctgggaattggaagtggttctacaattgtccatgctgtgcagcgaatagctgaaagggtgaagcaagagaatctgaacctcgtctgtattcccacttccttccaggcccgccagctcatcctgcagtatggcttgaccctcagtgatctggatcgacacccagagatcgaccttgccatcgatggtgctgatgaagtagatgctgatctcaatctcatcaagggtggcggaggctgcctgacccaggagaagattgtggctggctatgctagtcgcttcatcgtgatcgctgatttcaggaaagattcgaagaatctcggggatcagtggcacaagggaatccccatcgaggtcatcccaatggcctatgtcccagtgagccgagctgtgagccagaagtttgggggcgtggttgaacttcgaatggctgtcaacaaggctggtcctgtggtgacagataatgggaattttatcttggactggaagtttgaccgggtacacaaatggagtgaagtgaatacagctatcaaaatgatcccaggtgtggtggacacaggcctattcatcaacatggctgagagagtctactttgggatgcaggatggctcagtgaacatgagggagaagcctttctgttga

SEQ ID NO: 405 - DNA, 744 bp, Homo Sapiens
atggctgggatcaccaccatcgaggcggtgaagcgcaagatccaggttctgcagcagcaggcagatgatgcagaggagcgagctgagcgcctccagcgagaagttgagggagaaaggcgggcccgggaacaggctgaggctgaggtggcctccttgaaccgtaggatccagctggttgaagaagagctggaccgtgctcaggagcgcctggccactgccctgcaaaagctggaagaagctgaaaaagctgctgatgagagtgagagaggtatgaaggttattgaaaaccgggccttaaaagatgaagaaaagatggaactccaggaaatccaactcaaagaagctaagcacattgcagaagaggcagataggaagtatgaagaggtggctcgtaagttggtgatcattgaaggagacttggaacgcacagaggaacgagctgagctggcagagtcccgttgccgagagatggatgagcagattagactgatggaccagaacctgaagtgtctgagtgctgctgaagaaaagtactctcaaaaagaagataaatatgaggaagaaatcaagattcttactgataaactcaaggaggcagagacccgtgctgagtttgctgagagatcggtagccaagctggaaaagacaattgatgacctggaagagcgtctctacagccaacttgagcgaaaccgcctgctttctaatgagctgaagctaacgctgcatgatctgtgtgactga

SEQ ID NO: 406 - DNA, 5499 bp, Homo Sapiens
atggaggacacacccccctcactcagctgctccgactgtcagcgccactttcccagcctcccagagctctctcggcaccgagaactgctccatccatctcccaaccaggacagtgaggaggctgacagcatccctcggccctaccgttgtcagcagtgtgggcggggctaccgtcaccccgggagcctggttaaccatcgtcggacccacgagactggccttttcccctgtaccacctgtggcaaggacttctccaatcccatggctctcaagagccatatgaggacacatgctcctgagggccgccgcaggcacaggcccccacgccccaaggaagccactccacacctccagggtgagacggtgtccactgactcctggggccaaaggcttggctctagtgaaggctgggaaaaccagacaaaacatacagaagagacacctgactgtgaatctgtacctgaccccagggcagcttcgggtacgtgggaagatctgcccaccagacaaagagaaggcttggcaagccacccaggtcctgaggatggtgcagacggctggggaccctccactaactctgccagagcccctcctctccccatcccagccagcagccttcttagcaacttggaacagtatctggctgaatcagtagtgaacttcacagggggccaggagcccacccagtcccctcctgctgaggaggagcggcggtacaaatgtagtcagtgtggcaagacctacaagcacgccgggagcctcaccaaccaccgccagagccacacgctgggcatctacccctgtgccatctgtttcaaggagttctctaacctcatggctctgaagaaccactctcgactgcatgcccagtatcggccttaccactgtccccactgcccccgtgtcttccggctcccccgggagctgctggaacaccagcagtcccatgagggtgaaaggcaggagccacgctgggaggagaaagggatgcccaccaccaatgggcacacagatgagagcagccaggaccagctccccagtgcacagatgctgaatggctctgcggagctcagcacctctggggagctggaggacagtggcctggaggaataccggcctttccgctgtggggactgtggccgtacttaccgccatgctgggagcctcatcaaccatcgaaagagccaccagacaggtgtctacccctgctcactctgttctaagcagctgttcaatgcggctgccctcaaaaaccatgtgcgggctcatcacaggcccaggcaaggagttggggaaaatgggcagccatcagtcccaccagctcccctgctgctggctgagaccacccacaaagaggaagaggaccccaccaccaccctggaccatcggccctataagtgcagtgagtgtggtcgtgcttaccgccaccgggggagcctggtgaaccatcgccacagccatcggactggagagtaccagtgctcactctgtccccgcaagtaccccaatctcatggccctgcgcaaccacgtgcgggtacattgcaaggctgctcgccgaagtgcagacatcggggctgagggtgcccccagccacctcaaggtagaactcccgcctgacccagtggaggcagaggcagccccgcacacagatcaggaccatgtgtgcaaacatgaagaagaggccacggacatcaccccagcagcagacaagacagcagcacatatctgtagcatctgtgggctgctctttgaagacgctgagagccttgaacgtcatggcctgactcatggggcaggggaaaaggaaaatagcagaacagagaccacaatgtcacctcctagggcctttgcctgccgagactgtggaaagagctatcgccactcaggcagccttatcaaccacaggcagacccaccagacaggagacttcagttgtggggcctgtgccaagcacttccacaccatggctgccatgaagaaccacttgcgccggcacagtcggcggcggagcaggcggcatcggaagcgggctggcggtgccagcggtgggagagaagccaaactcctggcagcggagagctggacccgggagctagaagacaatgaaggcctggagtctccccaagacccttcaggggaaagtcctcatggggctgaaggcaacctggaaagtgatggggactgtttgcaggctgaatctgaaggggacaaatgtgggcttgagagggatgagacccatttccagggtgataaagagagcggaggcactggggaaggactggaaaggaaggatgccagtttacttgacaacttggacatcccaggtgaggaaggtggtggcactcacttctgcgatagcctcactggggtggatgaagaccagaagccagccactggccaacccaactcctcttcccactctgccaatgctgtcactggctggcaggctggggccgctcacacatgctctgactgtgggcattctttcccccatgccactggcctgctgagccacaggccctgccacccaccaggcatctatcagtgctccctctgcccgaaggagtttgactctctgcctgccctccgcagccacttccagaaccataggcctggggaggcgacctcagcacagcctttcctctgctgcctctgtggcatgatcttccctgggcgggctggctacaggcttcaccggcgccaggcccacagctcctctggcatgactgagggctcagaggaggagggggaagaggaaggagtggcagaggcagcccctgcacgcagtccaccactgcagctctcggaagcagagctgctgaatcagctgcagcgggaggtggaagcgctggacagtgcagggtatgggcacatctgtggctgctgtggtcagacctacgatgacctggggagcctggagcgtcaccaccaaagtcagagttctgggactactgcagacaaggctcccagccccttgggagtggcaggtgatgccatggagatggtcgtggacagtgtcttggaggacatagtgaattctgtctctggagagggtggagatgccaagtctcaagagggagcaggcacccccttgggagacagcctctgcatccagggtggggaaagtttgttggaggctcagccccgccccttccgctgcaaccagtgtggcaagacctatcgccatgggggcagcctggtgaaccaccgcaagatccaccagactggagactttctctgccctgtctgctcccgctgctaccccaacctggctgcctaccgtaatcatctgcggaaccaccctcgctgcaaaggctctgagccccaggttgggcccatcccagaggcagcaggtagcagtgagctgcaggttgggcccatcccagaaggaggcagcaacaagccccagcacatggcagaggaggggccggggcaagcagaagtcgagaagctccaggaagaacttaaagtggagcccctggaggaagtggccagggtgaaagaagaggtgtgggaggagaccactgtgaagggggaggagatagagcccaggctggagactgccgagaagggctgccagactgaagccagctctgagcggcccttcagctgcgaggtgtgtggccgatcctacaagcacgccggcagcctcatcaaccaccggcagagccaccagaccggccactttggctgtcaggcctgctccaagggcttctcaaacctcatgtccctcaagaaccaccggcgcatccatgcagatccccgacgtttccgctgcagcgagtgtgggaaggccttccgcctgcggaaacagctggccagccaccagcgggtccacatggaacggcgtgggggtgggggcacccgaaaggcgactcgggaagatcggcccttccgctgtgggcagtgcgggcggacctatcgccacgccggcagcctcctgaaccaccggcgcagccacgagacgggccagtacagctgccccacctgccccaagacctactccaaccgcatggccctgaaggaccaccagaggctgcactcagagaatcggcggcgacgggctggacggtccaggcgcacagctgtgcgttgcgccctctgtggccgcagcttccctggccggggatctttggagcggcacctgcgggagcatgaggagacagaaagggagccagccaatggccagggaggcctggatggcacagcggccagtgaggcgaacctgactggcagccagggactagagacccaattgggtggtgctgagccagtaccccacttggaggatggagtcccaaggccaggggagcgcagtcagagccccatcagggcagcaagctcagaagccccagagccactgtcctggggtgcagggaaggcaggtgggtggccggtaggtgggggactggggaatcatagtggaggctgggttcctcagttcctaactaggtcagaggagccagaggacagtgtccacaggagtccttgccacgctggtgactgccagctcaatggacctactctgagtcacatggatagctgggacaacagagacaacagctctcagctgcagccagggagccactcctcttgcagccagtgtggcaagacttactgccagtcaggcagcctcttgaaccacaacaccaacaagacagaccgacactattgcctgctctgctccaaggagttcttaaatcctgtggccacaaagagccacagccacaaccacatagacgcccagacctttgcctgtcctgactgtggcaaagcctttgagtcccaccaggaactggccagccacctgcaggctcatgcccggggccacagccaggtgccagcccagatggaggaggccagagatcccaaagccgggactggggaggaccaggtggttctccctggtcaagggaaagcccaggaggccccatcagaaacccccagaggcccaggagagagtgtggagagagccaggggaggacaagcggtgacgtccatggcggctgaggacaaggagcggcccttccgctgcacccagtgcgggcgctcctaccgccatgctggcagcctgctgaaccaccagaaggcccacaccacagggttgtacccgtgctccctctgtcccaaacttctccctaacctgctgtctcttaagaaccacagcaggacccacacggaccccaagcgccactgctgcagcatctgtggcaaggcctttcggacagctgcccggctggagggccacgggcgggtccatgcaccccgggaggggcctttcacctgcccccattgtccccgccacttccgccgccgaatcagcttcgtgcagcaccagcagcagcaccaggaggagtggacggtggccggctccggagccccagtggcaccagtgacgggcagaggggacttgccattgccccctccacccacccccacgaccccactcctggatccttcaccccagtggcctgcagacctcagcttctccctctga

SEQ ID NO: 407 - DNA, 1860 bp, Homo Sapiens
atgtcaggcctggtgttggggcagcgggatgagcctgcaggccaccggctcagccaagaggagatcctggggagcacacggctggtcagccaagggctagaggccctacgcagtgaacaccaggccgtgctgcaaagcctgtcccagaccattgagtgtctgcagcagggaggccatgaggaagggctggtgcatgagaaggcccggcagcttcgccgttctatggaaaacattgagctcgggctgagtgaggcccaggtgatgctggctctagccagccacctgagcacagtggagtcggagaaacagaagctgcgggctcaggtgcggcggctatgccaggagaaccagtggctgcgggatgagctggctggcacccagcagcggctacagcgcagtgaacaggctgtggctcagctggaggaggaaaagaagcacctggagttcctggggcagctgcggcagtatgatgaggatggacatacctcggaggagaaagaaggcgatgccaccaaggattccctggatgacctctttcctaatgaggaggaagaggaccccagcaatggcttgtcccgtggtcaaggtgctacagcagctcagcagggtggatatgagatcccagcaaggttgcggacgttgcacaacctggtgatccagtacgcagcccaaggtcgctatgaggtggccgtgccactctgtaagcaggcactagaggacctggagcgcacatcaggccgtggccaccctgatgtcgccaccatgctcaacatccttgctttggtgtatcgtgaccagaataagtataaggaagctgcccacctgctgaatgatgcccttagcatccgggagagcaccttgggacctgaccatcctgctgtggctgccacactcaacaatttggctgtgctctatggcaaaaggggcaagtacaaggaggcagagcctctgtgccagcgggcactggagattcgagaaaaggtcctgggcacgaatcatccagatgtggcaaaacagctgaacaacctggccctcttgtgccaaaaccagggcaagtatgaggccgtggaacgctactaccagcgagcactggccatctacgaggggcagctggggccggacaaccctaatgtagcccggaccaagaacaacctggcttcctgttacctgaaacagggcaaatatgctgaggctgagacactatacaaagagatcctgacccgtgcccatgtacaggagtttgggtctgtggatgatgaccacaagcccatctggatgcatgcagaggagcgggaggaaatgagcaaaagccggcaccatgagggtgggacaccctatgctgagtatggaggctggtacaaggcctgcaaagtgagcagccccacagtgaacactactctgagaaacctgggagctctgtataggcgccagggaaagctggaggctgctgagaccctggaggaatgtgccctgcggtcccggagacagggcactgaccctatcagccagacgaaggtggcagagctgcttggggagagtgatggtagaaggacctcccaggagggccctggagacagtgtgaaattcgagggaggtgaagatgcttctgtggctgtggagtggtccggggatggcagtgggaccctgcagaggagtggctctcttggcaagatccgggatgtgctccgcagaagcagtgaactcttggtgaggaagctccaggggactgagcctcggccctccagcagcaacatgaagcgagcagcctccttgaactatctgaaccaacctagtgcagcacccctccaggtctcccggggcctcagtgccagcaccatggacctctcttcaagcagctga

SEQ ID NO: 408 - DNA, 780 bp, Homo Sapiens
atgccgggagctaactaccgcgccggggccggggccggggccggggcccgacgtccccgcggggcccgggaccgcgaggaggacggcgggggcctggagcccgcggccgtggcccgcgacctattgaggggcacatctaacatgtcatttgaggagctgttggaattgcagagccaagtggggactaagacgtacaaacaattggtagctggaaatagtcctaagaaacaagcttctagaccacctatccaaaatgcatgtgttgcagataagcacaggcctctggaaatgtcagccaagatccgagtaccatttttacgtcaggttgttcccattagtaaaaaggtagcccgggaccctcgctttgatgatctgtcaggggaatataatcctgaggtgtttgacaaaacataccaattcttgaatgacatccgagcgaaagagaaagagcttgtgaaaaaacagttgaagaagcacctttcaggagaggagcatgagaaactgcagcaactgcttcagcgaatggagcagcaagaaatggcacagcaggaacgaaagcaacagcaggagctgcacctggccctgaagcaagaacgtcgggctcaggcccagcagggccatcggccatacttcctgaaaaaatctgagcagcgccagttggcactagctgagaagttcaaggagctgaaacgcagcaagaaattggagaacttcttgagtcgaaagaggcgacgaaatgcaggcaaggacaggagacatctccctttgagcaaagagtaa

SEQ ID NO: 409 - DNA, 4161 bp, Homo Sapiens
atgctgcgctacctgctgaaaacgctgctgcagatgaacttgttcgcggactctctggccggggacatctccaactccagcgagctgctcttgggcttcaactcctcgctggcggcgctcaaccacaccctgctgcctcccggcgatccctctctcaacgggtcaagggtaggaccggaggacgctatgccccgcatcgtggagcagccgccagatctgctggtctcccgaggcgagcccgccacgttgccctgccgcgctgaaggccgaccccgacccaacattgagtggtacaagaacggggcgcgtgtggccactgtgcgggaggatccgcgtgcgcaccgcctgctgctgcccagcggcgccctcttcttcccgcgcatcgtgcacgggcgccgcgcgcggccggacgaaggtgtctacacttgcgtggctcgcaactacctgggggcagcagcgagcagaaacgcctcgctggaagtggcagtcctccgtgatgatttccggcagtctcctggaaacgtggtggtggcagtgggggagccagcagtactggaatgcgtgcccccccgcggccacccggagccttccgtgtcctggaggaaggacggtgcaagactcaaggaagaggaaggaaggatcacgatccgtggagggaagctgatgatgtcacatacactcaagagcgatgcaggcatgtatgtgtgcgtagcctccaacatggcgggagaacgggagagtgcggcagctgaagtcatggtactggagcgtccctcattcctgcgcagaccagtgaatcaggtggtcctggctgatgcccctgtgactttcctatgtgaggtgaagggggatcccccacctcgtctacgctggcgcaaggaggatggggaactgcccacaggcaggtatgagatccggagtgaccacagcctttggattgggcatgtgagtgccgaagatgagggaacgtacacctgtgtggcggagaacagtgtgggccgcgctgaagcatctggctccctcagtgttcacgtcccaccccagttggtgacccagccccaggaccagatggcagctcctggagagagcgtggctttccagtgcgagaccaaaggaaaccccccacctgccatcttctggcagaaggaggggagtcaggtcctgcttttccccagtcagtcacttcagccgacggggcgcttctcagtgtctccaagaggccaacttaacatcaccgcggtgcagcgtggggatgctgggtactacgtgtgccaggctgtcagtgtggctggcagcatcctggccaaggccctgctggagataaaaggagcctctttggatgggctgcctcctgtcatcctccagggaccagccaatcagacgctggtgcttggctcctccgtgtggctgccctgcagagtgactgggaaccctcaacccagtgtccgatggaagaaggatgggcagtggctgcagggggatgacctccagttcaagacaatggccaacggtaccctgtacatcgccaatgtgcaggagatggacatgggcttctacagctgcgtggccaagagttccacaggggaagccacatggagcggctggcttaagatgcgggaagactggggagtatcaccagacccccctacagaacccagttcccctccgggggctccctctcagccagtggtcactgagatcaccaagaacagcattaccctgacctggaagcccaacccacaaactggggctgcagtcacgtcttatgtgatagaggccttcagcccagcagctggcaacacatggcgtactgtggcagatggcgtgcagctggagacacacacagtcagcggtctgcagcccaataccatctacctgtttctggttcgagcagtgggagcctggggcctcagtgagcccagccccgtctctgagcctgtccgtacacaggatagcagcccctctaggccagtggaggacccatggagaggccagcagggactggcggaagtggctgtgcgcctgcaggagcccatagtcctgggaccccggaccctgcaggtgtcctggactgtggatggcccagtccagctggtgcaaggtttccgggtgtcttggagggtagcaggccctgagggaggaagctggacaatgttggacctacagtccccaagccagcaaagtactgtgctaagaggactccctccagggacccaaatccagatcaaggtgcaagcccaaggccaggaggggctgggggctgaaagcctctctgtgaccaggagcattcctgaggaggcccccagtggccccccacagggagtggcggtggccttggggggtgatggcaacagcagtatcactgtgtcctgggaacctccactcccctcccagcaaaatggggtcatcacggaataccagatctggtgcctgggcaatgagagccgctttcacctcaatcgatctgcagcaggctgggcacgctccgcaatgctccgaggactggtgcccggtctcctctatcgaaccctggtcgcggcggccaccagcgcaggcgtgggcgtgcccagtgccccagtgctggtgcagctgccgtccccgccggacctggagcccgggctggaggtgggcgcggggctggcggtgcggctggcgagggtgctgcgggagcccgccttcctcgcgggcagcggcgcagcctgcggggcgctgcttctcgggctctgcgccgccctctactggcgccggaaacagcgcaaagagctcagccactacacggcctcttttgcctacacaccggcagtgtccttcccgcactcagagggcctctctggagccagttccaggccacccatgggccttggccccgccccctactcatggctggcagattcgtggccccacccatctcgaagcccctcggcccaggaacccaggggaagctgctgccctagcaatcctgacccggacgacagatattacaacgaagcgggaatctccctgtatctagctcagacggccaggggcacggccgcccctggcgagggtcctgtctatagcaccattgacccagcgggggaggagctgcagaccttccatgggggcttcccccaacatccctcaggagatctgggtccctggagccagtacgctcctccagagtggagccagggggacagtggagccaagggaggcaaagtgaagcttctggggaaacctgtgcagatgccctctctgaactggccagaagccctgcccccacctcctccttcttgtgaactgagctgcctagaagggccggaggaggagctggagggcagctcagagccagaggagtggtgcccgccaatgcctgagagaagtcacctgacggagcccagctccagtggagggtgcctggtcaccccatcccgaagggaaaccccctctcccacaccttcctatggacagcagtccacagccactcttacaccctcacctcctgaccctccccagcccccaactgacatgccccatctccatcagatgcccaggagggtgccccttgggccgagttcccctctcagtgtatcccagcccatgctgggcatccgtgaagcgaggcctgctggcttgggtgctggccctgcagcctcaccccacctcagccccagtcctgcccctagcacagccagcagtgccccaggcagaacctggcaggggaatggggagatgactcccccacttcaaggaccccgtgctcgattccggaagaaacccaaggctcttccctacaggagggagaacagtcctggggacttgcccccaccacccttgccaccgccagaggaagaggcgagctgggccctagagctgagggcagcaggcagcatgtcctccctggagcgggagcgcagtggggagaggaaagcggtccaggccgtgcccctggcagcccagcgggtgctccacccagatgaagaggcctggctcccatacagcagaccaagcttcctgtcccggggccagggcaccagcacatgttccacggccggcagcaactcttccaggggctccagcagctctaggggctcccggggccctggccggagccggagtcggagtcagagccggagccagagccaaaggccaggacagaaacgccgagaggaaccaagatga

SEQ ID NO: 410 - DNA, 2253 bp, Homo Sapiens
atgttaagagctaagaatcagctttttttactttcacctcattacctgaggcaggtaaaagaatcatcaggctccaggctcatacagcaacgacttctacaccagcaacagccccttcacccagaatgggctgccctggctaaaaagcagctgaaaggcaaaaacccagaagacctaatatggcacaccccggaagggatctctataaaacccttgtattccaagagagatactatggacttacctgaagaacttccaggagtgaagccattcacacgtggaccatatcctaccatgtatacctttaggccctggaccatccgccagtatgctggttttagtactgtggaagaaagcaataagttctataaggacaacattaaggctggtcagcagggattatcagttgcctttgatctggcgacacatcgtggctatgattcagacaaccctcgagttcgtggtgatgttggaatggctggagttgctattgacactgtggaagataccaaaattctttttgatggaattcctttagaaaaaatgtcagtttccatgactatgaatggagcagttattccagttcttgcaaattttatagtaactggagaagaacaaggtgtacctaaagagaagcttactggtaccatccaaaatgatatactaaaggaatttatggttcgaaatacatacatttttcctccagaaccatccatgaaaattattgctgacatatttgaatatacagcaaagcacatgccaaaatttaattcaatttcaattagtggataccatatgcaggaagcaggggctgatgccattctggagctggcctatactttagcagatggattggagtactctagaactggactccaggctggcctgacaattgatgaatttgcaccaaggttgtctttcttctggggaattggaatgaatttctatatggaaatagcaaagatgagagctggtagaagactctgggctcacttaatagagaaaatgtttcagcctaaaaactcaaaatctcttcttctaagagcacactgtcagacatctggatggtcacttactgagcaggatccctacaataatattgtccgtactgcaatagaagcaatggcagcagtatttggagggactcagtctttgcacacaaattcttttgatgaagctttgggtttgccaactgtgaaaagtgctcgaattgccaggaacacacaaatcatcattcaagaagaatctgggattcccaaagtggctgatccttggggaggttcttacatgatggaatgtctcacaaatgatgtttatgatgctgctttaaagctcattaatgaaattgaagaaatgggtggaatggccaaagctgtagctgagggaatacctaaacttcgaattgaagaatgtgctgcccgaagacaagctagaatagattctggttctgaagtaattgttggagtaaataagtaccagttggaaaaagaagacgctgtagaagttctggcaattgataatacttcagtgcgaaacaggcagattgaaaaacttaagaagatcaaatccagcagggatcaagctttggctgaacgttgtcttgctgcactaaccgaatgtgctgctagcggagatggaaatatcctggctcttgcagtggatgcatctcgggcaagatgtacagtgggagaaatcacagatgccctgaaaaaggtatttggtgaacataaagcgaatgatcgaatggtgagtggagcatatcgccaggaatttggagaaagtaaagagataacatctgctatcaagagggttcataaattcatggaacgtgaaggtcgcagacctcgtcttcttgtagcaaaaatgggacaagatggccatgacagaggagcaaaagttattgctacaggatttgctgatcttggttttgatgtggacataggccctcttttccagactcctcgtgaagtggcccagcaggctgtggatgcggatgtgcatgctgtgggcataagcaccctcgctgctggtcataaaaccctagttcctgaactcatcaaagaacttaactcccttggacggccagatattcttgtcatgtgtggaggggtgataccacctcaggattatgaatttctgtttgaagttggtgtttccaatgtatttggtcctgggactcgaattccaaaggctgccgttcaggtgcttgatgatattgagaagtgtttggaaaagaagcagcaatctgtataa

SEQ ID NO: 411 - DNA, 6411 bp, Homo Sapiens
atggcggatgtaaccgcccgtagtctgcaatacgagtacaaggcgaactcgaatcttgtgctccaagctgaccgttctctcattgaccggacccgccgggatgaacccacaggagaggtgctgtcccttgttgggaagctggagggcacccgtatgggagacaaggctcaacggaccaaaccgcagatgcaggaggaaagaagagccaagcgaagaaagcgtgatgaggaccggcatgacatcaacaagatgaagggttatactctgctgtcggagggcattgatgagatggtgggcatcatctacaagcccaaaactaaagagactcgggagacctatgaggtgctactcagcttcatccaggctgctcttggggaccagccacgtgatatcctttgtggggcagctgatgaagttctagctgttctaaagaatgaaaagctgcgggacaaggaaaggcgaaaggagattgacctgctgctgggtcaaacagatgataccagataccatgtgctagtgaacctgggcaaaaagatcacagactatggtggagataaggaaatccaaaatatggatgacaacattgatgagacatacggtgtgaatgtgcagtttgagtctgatgaggaggaaggtgatgaagacgtatacggggaggttcgagaagaggcatctgatgatgacatggaaggggacgaggctgtcgtgcgctgcaccctctcggctaatctcgtagcctcaggtgaactgatgagttccaagaagaaggatttgcaccctcgggatattgatgcattttggctgcagcggcagctcagtcgtttctatgatgatgccatcgtgtcgcagaagaaggcagatgaagtattggagattttgaagacggccagtgatgatcgggaatgtgaaaatcagctggttctgctgcttggtttcaacacctttgatttcattaaagtgttgcggcagcacaggatgatgattttatactgtaccttgctggccagtgcacaaagtgaagctgaaaaggaaaggattatgggaaagatggaagctgacccagagctatccaagttcctctaccagcttcatgaaaccgagaaggaggatctgatccgagaggaaaggtcccggagagagcgagtgcgtcagtctcgaatggacacagatctggaaaccatggatctcgaccagggtggagaggcactggctccacggcaggttctggacttggaggacctggtttttacccaagggagccactttatggccaataaacgctgtcagcttcctgatggatccttccgtcgccagcgtaagggctatgaagaggtgcatgtgcctgctctgaagcccaagccctttggctcagaagaacaactgcttccagtggaaaagctgccaaagtatgcccaggctgggtttgagggcttcaaaacactgaatcggatccagagtaagctctaccgtgctgcccttgagacggatgagaatctgctgctgtgtgctcctactggtgctgggaagaccaacgtggccctgatgtgcatgctccgagagattgggaaacacataaacatggacggcaccatcaatgtggatgacttcaagattatctacattgcccccatgcgctccttggtgcaggagatggtgggcagctttggaaagcgcctggccacttatggcatcactgttgctgaactgactggggaccaccagctgtgcaaagaagagatcagtgccactcagatcatcgtctgcacccccgagaagtgggacatcatcacccgcaagggtggtgagcgcacctacacccagctggtgcggctcatcattctggatgagattcatcttctccacgatgacagaggtcctgtcttagaagctttagtggccagggccatccgaaacattgagatgacccaagaggatgtccgactcattggtctcagtgccaccctacccaactatgaagatgtagccacctttctacgtgttgaccctgccaagggtctcttttactttgacaacagcttccgtccagtgcctctggaacagacatatgtgggtatcacagagaaaaaagctatcaagcgtttccagatcatgaatgaaatcgtctatgaaaaaatcatggaacatgctggaaaaaatcaggtgctggtgtttgtccactcccggaaggagactggaaagacagccagggccatccgggacatgtgcctagaaaaggacactctgggtctgtttctgagggagggctcagcctccacagaagtcctgcgaacagaagctgagcagtgcaagaacctagagctgaaggatcttctgccttatggctttgctattcatcacgcaggcatgaccagggttgaccgaacactcgtggaggatctttttgctgataaacatattcaggttttagtttccacagcaactctagcttggggtgtgaatctccctgcacatacagtcatcatcaaaggcacccaggtgtacagtccagagaaggggcgttggacagaactgggagcactggacattctgcagatgctgggacgtgccggaagaccccagtatgacaccaagggtgaaggcatactcatcacatctcatggggagctacagtactacctgtccctcctcaatcaacaacttcctattgaaagccagatggtttcaaagcttcctgacatgctcaatgcagaaatcgtgctaggaaatgtccagaatgccaaggatgcggtgaactggctgggctatgcctacctctatatccgaatgctgcgatccccaaccctctatggcatctctcatgatgacctcaagggagatcccctgctggaccagcgccgactagatctggttcatacagctgccctgatgctggacaagaacaatctggtcaagtacgacaagaagacgggcaacttccaggtgacagaactgggccgtatagccagccactactacatcaccaatgatacagtgcagacttacaaccagctgctgaagcccaccctgagtgagattgagcttttcagggtcttctcattgtcctctgagttcaagaacatcacagtgagagaggaggagaagctggagctgcagaagttgctggagagggtgcctatccctgtaaaggagagcattgaggaacccagtgctaagatcaacgttcttctgcaagccttcatctcacagctgaaattggagggctttgcactgatggctgacatggtgtatgtcacacagtcggctggccggttgatgcgagcgatatttgaaattgtcctgaaccgaggttgggcacagcttacagacaagaccctgaacctctgcaagatgatcgacaaacgcatgtggcagtccatgtgtcctctgcgccagttccggaaactccctgaggaagtagtgaagaagattgagaagaagaatttcccctttgagcgtctgtacgacctgaatcataatgagattggggagcttatccgcatgccaaagatggggaagaccatccacaaatatgtccatctgtttcccaagttggagttgtcagtgcacctgcagcctatcacacgctccaccctgaaggtggagctgaccatcacgccagacttccagtgggatgaaaaggtgcatggttcatccgaggctttttggattctggtggaggatgtggacagcgaggtgattctgcaccatgagtattttctcctcaaggccaagtacgcccaggacgagcacctcattacattcttcgtgcctgtctttgaaccgctgccccctcagtacttcatccgagtggtgtctgaccgctggctctcttgtgagacccagctgcctgtctccttccggcacctgatcttgccggagaagtacccccctccaaccgaacttttggacctgcagcccttgcccgtgtctgctctgagaaacagtgcctttgagagtctttaccaagataaatttcctttcttcaatcccatccagacccaggtgtttaacactgtatacaacagtgacgacaacgtgtttgtgggggcccccacgggcagcgggaagactatttgtgcagagtttgccatcctgcgaatgctgctgcagagctcggaggggcgctgtgtgtacatcacccccatggaggccctggcagagcaggtatacatggactggtacgagaagttccaggacaggctcaacaagaaggtggtactcctgacaggcgagaccagcacagacctgaagctgctgggcaaagggaacattatcatcagcacccctgagaagtgggacatactttcccggcgatggaagcagcgcaagaacgtgcagaacatcaacctcttcgtggtggatgaggtccaccttatcgggggcgagaatgggcctgtcttagaagtgatctgctcccgaatgcgctacatctcctcccagattgagcggcccattcgcattgtggcactcagctcttcgctctccaatgccaaggatgtggcccactggctgggctgcagtgccacctccaccttcaacttccatcccaatgtgcgtcccgtccccttggagctgcacatccagggcttcaacatcagccatacacaaacccgcctgctctccatggccaagcctgtgtaccatgctatcaccaagcactcgcccaagaagcctgtcattgtctttgtgccgtctcgcaagcagacccgcctcactgccattgacatcctcaccacctgtgcagcagacatccaacggcagaggttcttgcactgcaccgagaaggatctgattccgtacctggagaagctaagtgacagcacgctcaaggaaacgctgctaaatggggtgggctacctgcatgaggggctcagccccatggagcgacgcctggtggagcagctcttcagctcaggggctatccaggtggtggtggcttctcggagtctctgctggggcatgaacgtggctgcccacctggtaatcatcatggatacccagtactacaatggcaagatccacgcctatgtggattaccccatctatgacgtgcttcagatggtgggccacgccaaccgccctttgcaggacgatgaggggcgctgtgtcatcatgtgtcagggctccaagaaggatttcttcaagaagttcttatatgagccattgccagtagaatctcacctggaccactgtatgcatgaccacttcaatgctgagatcgtcaccaagaccattgagaacaagcaggatgctgtggactacctcacctggacctttctgtaccgccgcatgacacagaaccccaattactacaacctgcagggcatctcccatcgtcacttgtcggaccacttgtcagagctggtggagcagaccctgagtgacctggagcagtccaagtgcatcagcatcgaggacgagatggacgtggcgcctctgaacctaggcatgatcgccgcctactattacatcaactacaccaccattgagctcttcagcatgtccctcaatgccaagaccaaggtgcgagggcttatcgagatcatctccaatgcagcagagtatgagaacattcccatccggcaccatgaagacaatctcctgaggcagttggctcagaaggtcccccacaagctgaataaccctaagttcaatgatccgcacgtcaagaccaacctgctcctgcaggctcacttgtctcgcatgcagctgagtgctgagttgcagtcagatacggaggaaatccttagtaaggcaatccggctcatccaggcctgcgtggatgtcctttccagcaatgggtggctcagccctgctctggcagctatggaactggcccagatggtcacccaagccatgtggtccaaggactcatacctgaagcagctgccacacttcacctctgagcatatcaaacgttgcacagacaagggagtggagagtgttttcgacatcatggagatggaggatgaagaacggaacgcgttgcttcagctgactgacagccagattgcagatgtggctcgcttttgtaaccgctaccctaatatcgaactatcttatgaggtggtagataaggacagcatccgcagtggcgggccagttgtggtgctggtgcagctggagcgagaggaggaagtcacaggccctgtcattgcgcctctcttcccgcagaaacgtgaagagggctggtgggtggtgattggagatgccaagtccaatagcctcatctccatcaagaggctgaccttgcagcagaaggccaaggtgaagttggactttgtggccccagccactggtgcccacaactacactctgtacttcatgagtgacgcttacatgggatgtgaccaggagtacaaattcagcgtggatgtgaaagaagctgagacagacagtgattcagattga

SEQ ID NO: 412 - DNA, 264 bp, Homo Sapiens
atgtcaacctcagtccctcaaggccatacctggacccaacgggtgaagaaagacgatgaggaggaggacccgctggaccagctgatctcccgctctggctgtgctgcctcccactttgcagtgcaggagtgcatggcccagcaccaggactggcggcaatgccagccacaggtgcaggcgttcaaggattgcatgagtgaacagcaggcgaggcggcaagaggagctgcagaggaggcaagaacaagccggtgcccaccactga

SEQ ID NO: 413 - DNA, 759 bp, Homo Sapiens
atggtgtcctggatcatctctcgcctggtggtgctcatctttggcaccctgtacccagcctattcttcctacaaggccgtgaagacaaaaaacgtgaaggaatatgtgaaatggatgatgtactggatcgtctttgccttcttcaccacggccgagacgctcacggatatagtgctctcctggttccccttctactttgaactgaagatcgccttcgtgatatggctgctgtccccttacaccaagggctccagcgtgctctaccgcaagttcgtgcacccaacgctgtccaacaaggagaaggagatcgacgagtacatcacgcaggcccgagacaagagctatgagaccatgatgagggtgggcaagaggggcctgaaccttgccgccaatgctgcagtcacagctgccgccaagggggtgctgtcagagaagctccgcagcttcagcatgcaggacctgaccctgatccgggacgaggacgcactgcccctgcagaggcctgacggccgcctccgacccagccctggcagcctcctggacaccatcgaggacttaggagatgaccctgccctgagtctaaggtccagcacaaacccggcagattcccggacagaggcttctgaggatgacatgggagacaaagctcccaagagggccaaacccatcaaaaaagcgcccaaagctgagccactggcttccaagacactgaagacccggcccaagaagaagacctctggcgggggcgactcagcttga

SEQ ID NO: 414 - DNA, 2295 bp, Homo Sapiens
atgaacggagaagccgactgccccacagacctggaaatggccgcccccaaaggccaagaccgttggtcccaggaagacatgctgactttgctggaatgcatgaagaacaaccttccatccaatgacagctccaagttcaaaaccaccgaatcacacatggactgggaaaaagtagcatttaaagacttttctggagacatgtgcaagctcaaatgggtggagatttctaatgaggtgaggaagttccgtacattgacagaattgatcctcgatgctcaggaacatgttaaaaatccttacaaaggcaaaaaactcaagaaacacccagacttcccaaagaagcccctgaccccttatttccgcttcttcatggagaagcgggccaagtatgcgaaactccaccctgagatgagcaacctggacctaaccaagattctgtccaagaaatacaaggagcttccggagaagaagaagatgaaatatattcaggacttccagagagagaaacaggagttcgagcgaaacctggcccgattcagggaggatcaccccgacctaatccagaatgccaagaaatcggacatcccagagaagcccaaaaccccccagcagctgtggtacacccacgagaagaaggtgtatctcaaagtgcggccagatgccactacgaaggaggtgaaggactccctggggaagcagtggtctcagctctcggacaaaaagaggctgaaatggattcataaggccctggagcagcggaaggagtacgaggagatcatgagagactatatccagaagcacccagagctgaacatcagtgaggagggtatcaccaagtccaccctcaccaaggccgaacgccagctcaaggacaagtttgacgggcgacccaccaagccacctccgaacagctactcgctgtactgcgcagagctcatggccaacatgaaggacgtgcccagcacagagcgcatggtgctgtgcagccagcagtggaagctgctgtcccagaaggagaaggacgcctatcacaagaagtgtgatcagaaaaagaaagattacgaggtggagctgctccgtttcctcgagagcctgcctgaggaggagcagcagcgggtcttgggggaagagaagatgctgaacatcaacaagaagcaggccaccagccccgcctccaagaagccagcccaggaagggggcaagggcggctccgagaagcccaagcggcccgtgtcggccatgttcatcttctcggaggagaaacggcggcagctgcaggaggagcggcctgagctctccgagagcgagctgacccgcctgctggcccgaatgtggaacgacctgtctgagaagaagaaggccaagtacaaggcccgagaggcggcgctcaaggctcagtcggagaggaagcccggcggggagcgcgaggaacggggcaagctgcccgagtcccccaaaagagctgaggagatctggcaacagagcgttatcggcgactacctggcccgcttcaagaatgaccgggtgaaggccttgaaagccatggaaatgacctggaataacatggaaaagaaggagaaactgatgtggattaagaaggcagccgaagaccaaaagcgatatgagagagagctgagtgagatgcgggcacctccagctgctacaaattcttccaagaagatgaaattccagggagaacccaagaagcctcccatgaacggttaccagaagttctcccaggagctgctgtccaatggggagctgaaccacctgccgctgaaggagcgcatggtggagatcggcagtcgctggcagcgcatctcccagagccagaaggagcactacaaaaagctggccgaggagcagcaaaagcagtacaaggtgcacctggacctctgggttaagagcctgtctccccaggaccgtgcagcatataaagagtacatctccaataaacgtaagagcatgaccaagctgcgaggcccaaaccccaaatccagccggactactctgcagtccaagtcggagtccgaggaggatgatgaagaggatgaggatgacgaggacgaggatgaagaagaggaagatgatgagaatggggactcctctgaagatggcggcgactcctctgagtccagcagcgaggacgagagcgaggatggggatgagaatgaagaggatgacgaggacgaagacgacgacgaggatgacgatgaggatgaagataatgagtccgagggcagcagctccagctcctcctcctcaggggactcctcagactctgactccaactga

SEQ ID NO: 415 - DNA, 867 bp, Homo Sapiens
atgagcgacagcggcgagcagaactacggcgagcgggaatcccgttctgcttccagaagtggaagtgctcacggatcggggaaatctgcaaggcatacccctgcaaggtctcgctccaaggaagattccaggcgttccagatcaaagtccaggtcccgatctgaatctaggtctagatccagaagaagctcccgaaggcattatacccggtcacggtctcgctcccgctcccatagacgatcacgtagcaggtcttacagtcgagattatcgtagacggcacagccacagccattctcccatgtctactcgcaggcgtcatgttgggaatcgggcaaatcctgatcctaactgttgtcttggagtatttgggctgagcttgtacaccacagaaagagatctaagagaagtgttctctaaatatggtcccattgccgatgtgtctattgtatatgaccagcagtctaggcgttcaagaggatttgcctttgtatattttgaaaatgtagatgatgccaaggaagctaaagaacgtgccaatggaatggagcttgatgggcgtaggatcagagttgatttctctataacaaaaagaccacatacgccaacaccaggaatttacatggggagacctacctatggcagctctcgccgtcgggattactatgacagaggatatgatcggggctatgatgatcgggactactatagcagatcatacagaggaggaggtggaggaggaggaggatggagagctgcccaagacagggatcagatttatagaaggcggtcaccttctccttactatagtcgtggaggatacagatcacgttccagatctcgatcatactcacctcgtcgctattaa

SEQ ID NO: 416 - DNA, 2379 bp, Homo Sapiens
atgcaaggggaggacgccagatacctcaaaaggaaagttaaaggagggaatatagatgtacatccatcagaaaaagcactcattgttcactatgaagtggaagctaccattcttggagaaatgggggaccccatgttgggagaacgaaaagaatgtcaaaaaatcattcgacttaagagtctcaatgccaacacagatataacttccctggcaaggaaggtggttgaagaatgtaaactcattcatccttcaaaactaaatgaggtagaacagctgttgtactatctacagaaccgccgtgattcattgtcaggaaaagagaaaaaagaaaaatcaagcaagcctaaagatccacctccttttgaaggaatggagattgatgaagttgctaacattaatgacatggatgaatatattgagttattatatgaagatattcctgacaaagttcggggttctgctttgatcctgcagcttgctcgaaatcctgataacttggaagaactactattgaatgaaactgcccttggtgcattagcaagggtcctgagagaagactggaagcaaagtgtcgagttagctacaaacataatttacatctttttttgtttctccagcttttctcaatttcatggacttattactcactataaaattggagctctgtgtatgaatattattgatcatgagttaaaaagacatgagctttggcaagaagaactctcaaagaagaagaaagctgttgatgaagaccctgaaaaccaaaccttgagaaaggattatgaaaaaacctttaaaaagtaccaggggcttgtggtaaaacaggaacagctattacgagttgctctttatttgcttctgaatcttgctgaggatactcgtaccgaactgaaaatgaggaacaagaacatagttcacatgttggtgaaagcccttgatcgggacaattttgagctgctaattttagttgtgtcattcttgaagaaactcagcatttttatggagaataaaaatgatatggtggaaatggatattgttgaaaaactggtgaaaatgataccttgtgagcatgaagacctgctgaatatcaccctccgacttttactaaacctatcctttgacacaggactgaggaataagatggtacaagttggactgcttcccaagctcactgcactcctaggcaatgacaactacaaacaaatagcaatgtgtgttctttaccacataagcatggatgaccgctttaaatcaatgtttgcatacactgactgtataccacagttaatgaagatgctgtttgaatgttcagatgaacgaattgacttggaactcatttctttctgcattaatcttgctgctaacaaaagaaatgtacagcttatctgtgaaggaaatgggctgaagatgctcatgaagagggctctgaagtttaaggatccattgctgatgaaaatgattagaaacatttctcagcatgatggaccaactaaaaatctgtttattgattatgttggggaccttgcagcccagatctctaatgatgaagaagaggagtttgtgattgaatgtttgggaactcttgcaaacttgaccattccagacttagactgggaattggttcttaaagaatataagttggttccatacctcaaggataaactaaaaccaggtgctgcagaagatgatcttgttttagaagtggttataatgattggaactgtatccatggatgactcttgtgctgcattgctagccaaatctggcataatccctgcactcattgaattgctaaatgctcaacaagaagatgatgaatttgtgtgtcagataatttatgtcttctaccagatggttttccaccaagccacaagagacgtcataatcaaggaaacacaggctccagcatatctcatagacctaatgcatgataagaataatgaaatccgaaaggtctgtgataatacattagatattatagcggaatatgatgaagaatgggctaagaaaattcagagtgaaaagtttcgctggcataactctcagtggctggagatggtagagagtcgtcagatggatgagagtgagcagtacttgtatggtgatgatcgaattgagccatacattcatgaaggagatattctcgaaagacctgaccttttctacaactcagatggattaattgcctctgaaggagccataagtcccgatttcttcaatgattaccaccttcaaaatggagatgttgttgggcagcattcatttcctggcagccttggaatggatggctttggccaaccagttggcattcttggacgccctgccacagcatatggattccgccctgatgaaccttactactatggctatggatcttga

SEQ ID NO: 417 - DNA, 1758 bp, Homo Sapiens
atggcgccgtccacgccgctcttgacagtccgaggatcagaaggactgtacatggtgaatggaccaccacattttacagaaagcacagtgtttccaagggaatctgggaagaattgcaaagtctgtatctttagtaaggatgggaccttgtttgcctggggcaatggagaaaaagtaaatattatcagtgtcactaacaagggactactgcactccttcgacctcctgaaggcagtttgccttgaattctcacccaaaaatactgtcctggcaacgtggcagccttacactacttctaaagatggcacagctgggatacccaacctacaactttatgatgtgaaaactgggacatgtttgaaatctttcatccagaaaaaaatgcaaaattggtgtccatcctggtcagaagatgaaactctttgtgcccgcaatgttaacaatgaagttcacttctttgaaaacaacaattttaacacaattgcaaataaattgcatttgcaaaaaattaatgattttgtattatcacctggaccccaaccatacaaggtggctgtctatgttccaggaagtaaaggtgcaccttcatttgttagattatatcagtaccccaactttgctggacctcatgcagctttagctaataaaagtttctttaaggcagataaagttacaatgctgtggaataaaaaagctactgctgtgttggtaatagctagcacagatgttgacaagacaggagcttcctactatggagaacaaactctacactacattgcaacaaatggagaaagtgctgtagtgcaattaccaaaaaatggccccatttatgatgtagtttggaattctagttctactgagttttgtgctgtatatggttttatgcctgccaaagcgacaattttcaacttgaaatgtgatcctgtatttgactttggaactggtcctcgtaatgcagcctactatagccctcatggacatatattagtattagctggatttggaaatctgaggggacaaatggaagtgtgggatgtgaaaaactacaaacttatttctaaaccggtggcttctgattctacatattttgcttggtgcccggatggtgagcatattttaacagctacatgtgctcccaggttacgggttaataatggatacaaaatttggcattatactggctctatcttgcacaagtatgatgtgccatcaaatgcagaattatggcaggtttcttggcagccatttttggatggaatatttccagcaaaaacaataacttaccaagcagttccaagtgaagtacccaatgaggaacctaaagttgcaacagcttatagacccccagctttaagaaataaaccaatcaccaattccaaattgcatgaagaggaaccacctcagaatatgaaaccacaatcaggaaacgataagccattatcaaaaacagctcttaaaaatcaaaggaagcatgaagctaagaaagctgcaaagcaggaagcaagaagtgacaagagtccagatttggcacctactcctgccccacagagcacaccacgaaacactgtctctcagtcaatttctggggaccctgagatagacaaaaaaatcaagaacctaaagaagaaactgaaagcaatcgaacaactgaaagaacaagcagcaactggaaaacagctagaaaaaaatcagttggagaaaattcagaaagaaacagcccttctccaggagctggaagatttggaattgggtatttaa

SEQ ID NO: 418 - DNA, 777 bp, Homo Sapiens
atggccagacctcccgtgcccggttcggtggttgtcccaaactggcacgagagtgccgagggcaaggagtacctggcttgcattctgcgcaagaaccgccggcgggtgtttgggctgcttgagcggccagtgctgctgccgcctgtgtccattgacactgccagctacaagatctttgtgtccgggaagagtggtgtgggcaagacggcgctggtggccaagctggctggcctggaggtgcctgtggtgcaccacgagaccaccggcatccagaccaccgtggtattttggccagccaagctgcaggccagcagccgtgtcgtcatgtttcgttttgagttctgggactgtggagagtctgcactcaaaaagttcgatcatatgctgctggcttgcatggagaacacagatgccttcctcttcctcttctccttcactgaccgtgcctcctttgaagacctccctggacagctggcccgcatagcaggtgaggcccctggtgtcgtcaggatggtcatcggctccaaatttgaccagtacatgcacacggacgtgcccgagcgggacctcacagccttccggcaggcctgggagctgcccctgctacgggtgaagagtgtgccggggcggcggctggctgatgggcgcacactggacgggcgggctgggctggccgacgttgcccacatactcaatggccttgctgagcagctgtggcaccaggaccaggtggcggctggcctgcttcccaaccccccagagagtgctcctgaatga

SEQ ID NO: 419 - DNA, 3072 bp, Homo Sapiens
atggggaagggggttggacgtgataagtatgagcctgcagctgtttcagaacaaggtgataaaaagggcaaaaagggcaaaaaagacagggacatggatgaactgaagaaagaagtttctatggatgatcataaacttagccttgatgaacttcatcgtaaatatggaacagacttgagccggggattaacatctgctcgtgcagctgagatcctggcgcgagatggtcccaacgccctcactccccctcccactactcctgaatggatcaagttttgtcggcagctctttggggggttctcaatgttactgtggattggagcgattctttgtttcttggcttatagcatccaagctgctacagaagaggaacctcaaaacgataatctgtacctgggtgtggtgctatcagccgttgtaatcataactggttgcttctcctactatcaagaagctaaaagttcaaagatcatggaatccttcaaaaacatggtccctcagcaagcccttgtgattcgaaatggtgagaaaatgagcataaatgcggaggaagttgtggttggggatctggtggaagtaaaaggaggagaccgaattcctgctgacctcagaatcatatctgcaaatggctgcaaggtggataactcctcgctcactggtgaatcagaaccccagactaggtctccagatttcacaaatgaaaaccccctggagacgaggaacattgccttcttttcaaccaattgtgttgaaggcaccgcacgtggtattgttgtctacactggggatcgcactgtgatgggaagaattgccacacttgcttctgggctggaaggaggccagacccccattgctgcagaaattgaacattttatccacatcatcacgggtgtggctgtgttcctgggtgtgtctttcttcatcctttctctcatccttgagtacacctggcttgaggctgtcatcttcctcatcggtatcatcgtagccaatgtgccggaaggtttgctggccactgtcacggtctgtctgacacttactgccaaacgcatggcaaggaaaaactgcttagtgaagaacttagaagctgtggagaccttggggtccacgtccaccatctgctctgataaaactggaactctgactcagaaccggatgacagtggcccacatgtggtttgacaatcaaatccatgaagctgatacgacagagaatcagagtggtgtctcttttgacaagacttcagctacctggcttgctctgtccagaattgcaggtctttgtaacagggcagtgtttcaggctaaccaggaaaacctacctattcttaagcgggcagttgcaggagatgcctctgagtcagcactcttaaagtgcatagagctgtgctgtggttccgtgaaggagatgagagaaagatacgccaaaatcgtcgagatacccttcaactccaccaacaagtaccagttgtctattcataagaaccccaacacatcggagccccaacacctgttggtgatgaagggcgccccagaaaggatcctagaccgttgcagctctatcctcctccacggcaaggagcagcccctggatgaggagctgaaagacgcctttcagaacgcctatttggagctggggggcctcggagaacgagtcctaggtttctgccacctctttctgccagatgaacagtttcctgaagggttccagtttgacactgacgatgtgaatttccctatcgataatctgtgctttgttgggctcatctccatgattgaccctccacgggcggccgttcctgatgccgtgggcaaatgtcgaagtgctggaattaaggtcatcatggtcacaggagaccatccaatcacagctaaagctattgccaaaggtgtgggcatcatctcagaaggcaatgagaccgtggaagacattgctgcccgcctcaacatcccagtcagccaggtgaaccccagggatgccaaggcctgcgtagtacacggcagtgatctaaaggacatgacctccgagcagctggatgacattttgaagtaccacactgagatagtgtttgccaggacctcccctcagcagaagctcatcattgtggaaggctgccaaagacagggtgctatcgtggctgtgactggtgacggtgtgaatgactctccagctttgaagaaagcagacattggggttgctatggggattgctggctcagatgtgtccaagcaagctgctgacatgattcttctggatgacaactttgcctcaattgtgactggagtagaggaaggtcgtctgatctttgataacttgaagaaatccattgcttataccttaaccagtaacattcccgagatcaccccgttcctgatatttattattgcaaacattccactaccactggggactgtcaccatcctctgcattgacttgggcactgacatggttcctgccatctccctggcttatgagcaggctgagagtgacatcatgaagagacagcccagaaatcccaaaacagacaaacttgtgaatgagcggctgatcagcatggcctatgggcagattggaatgatccaggccctgggaggcttctttacttactttgtgattctggctgagaacggcttcctcccaattcacctgttgggcctccgagtggactgggatgaccgctggatcaacgatgtggaagacagctacgggcagcagtggacctatgagcagaggaaaatcgtggagttcacctgccacacagccttcttcgtcagtatcgtggtggtgcagtgggccgacttggtcatctgtaagaccaggaggaattcggtcttccagcaggggatgaagaacaagatcttgatatttggcctctttgaagagacagccctggctgctttcctttcctactgccctggaatgggtgttgctcttaggatgtatcccctcaaacctacctggtggttctgtgccttcccctactctcttctcatcttcgtatatgacgaagtcagaaaactcatcatcaggcgacgccctggcggctgggtggagaaggaaacctactattag

SEQ ID NO: 420 - DNA, 336 bp, Homo Sapiens
atggcaaatattcaccaggaaaacgaagagatggagcagcctatgcagaatggagaggaagaccgccctttgggaggaggtgaaggccaccagcctgcaggaaatcgacggggacaggctcgccgacttgcccctaattttcgatgggccatacccaataggcagatcaatgatgggatgggtggagatggagatgatatggaaatattcatggaggagatgagagaaatcagaagaaaacttagggagctgcagttgaggaattgtctgcgtatccttatgggggagctctctaatcaccatgaccatcatgatgaattttgccttatgccttga

SEQ ID NO: 421 - DNA, 1605 bp, Homo Sapiens
atgttgtccccagtgtcccgagacgcgtctgatgctctgcagggacggaagtgcctgcgtccccgatcgagacgcctgccgctcccggcagctgtccgcgcccacggtcctatggcggagctaacggactccgcgcggggctgtgtggtctttgaggatgtgtttgtatacttctctcgggaagaatgggagcttcttgatgatgctcagagacttttgtaccatgatgtgatgctggagaactttgcacttttagcctcactgggaattgcattttccagatcacgtgcagtcatgaaactagagcgaggagaagagccctgggtgtatgaccaggtggatatgacttcagccacagaaagagaggcccagaggggacttagacctggttgttggcatggagtggaggatgaagaggtatcttctgagcagagcatttttgtagcaggagtgtcagaggtcaggactctcatggcagagctggagtctcacccatgtgacatatgtggcccaatattgaaagataccttacacctggctaaataccatgggggaaaagccaggcagaaaccatacttgtgtggggcatgtggaaagcaattctggttcagtacagactttgaccagcaccagaaccagcccaatggagggaaacttttcccaaggaaggagggcagagactctgtgaaaagctgcagagtccatgtgccagagaagaccctcacatgtgggaaaggtaggagagacttttcagccacatctggccttcttcagcatcaggcctctctcagcagcatgaagccccacaagagcactaagcttgtgagtggctttctcatgggacagaggtatcacaggtgtggtgaatgtgggaaagccttcacccgcaaagacacacttgctcggcatcagagaatccacactggagaaaggccttatgagtgtaacgaatgtgggaaattcttcagccaaagctatgacctctttaaacaccagacagttcacactggagaaaggccatacgagtgcagcgaatgtgggaaattctttagacaaatctccggcctgattgagcacaggcgagttcacacgggtgaaagactctatcagtgtggcaaatgtgggaaattttttagcagtaagtctaatctcattcgacaccaggaagttcacacaggagccaggccttatgtatgcagcgaatgtgggaaagagttcagtcggaaacacacacttgttctgcaccaacgaactcacactggagaaaggccttatgagtgcagtgaatgtgggaaggcctttagccaaagctcccaccttaatgtacactggagaattcacagcagtgattatgagtgtagcagatgtggtaaagctttcagctgcatctccaaactcattcagcaccagaaagttcactctggagaaaagccttatgagtgcagcaagtgcgggaaagccttcactcaaagacccaacctcatcaggcactggaaagtccacactggggaaaggccttatgtgtgtagtgagtgcgggagagaattcatccggaaacagacacttgttctgcaccagagggttcatgctggagaaaagctttaa

SEQ ID NO: 422 - DNA, 1260 bp, Homo Sapiens
atggccaaggaaggcgtggagaaggcggaggagacggagcaaatgatcgagaaggaggcaggcaaggagccggcggagggcggcggcggcgacggctcgcaccgcctcggggacgcccaggagatgcgcgcggtggtgctggctggcttcggggggctcaacaagctgcggctcttcaggaaggccatgcccgagcctcaggacggcgagctcaagatccgcgtcaaagcctgtggattaaacttcattgacttgatggtgcgacaagggaatattgacaaccctcccaagactcccctggtgccaggatttgagtgttctgggattgttgaagctctgggggacagcgtgaaaggatatgagattggagaccgtgtcatggcatttgtcaattacaatgcctgggcagaggtggtctgcacaccagtggagtttgtctacaagatcccggatgacatgagcttctcggaggctgctgcattccccatgaacttcgtcacagcctatgtgatgctgtttgaagttgccaacctccgggaagggatgtctgtgctcgtgcactcagctggtgggggcgtgggtcaagctgtggctcagctgtgttccactgtccccaacgtgactgtctttggaacagcctctactttcaagcatgaagcaatcaaagactctgtgacccacctctttgacagaaatgcagactacgtgcaagaagttaaaagaatctctgctgaaggtgtggacatcgttttggattgcctctgtggggacaacactggaaaaggtctcagtcttctcaaacccctgggaacctacattttatatggctcatccaacatggtaactggagagaccaagagcttcttcagctttgcaaaatcatggtggcaggtggagaaggtgaaccccatcaagctgtatgaggagaacaaagtcatcgcggggttttcccttttaaatctgctcttcaaacaaggccgggcgggcctcattcggggagtggtggaaaaactcatagggctctacaaccagaagaagatcaagcctgtggtggactccttgtgggctctggaggaggtgaaggaggccatgcagcggattcacgaccgagggaacattggcaagttaattctggatgtagaaaagaccccaactccactgatggccaatgacagcacagagaccagtgaagcaggggaagaggaggaggaccacgagggagacagcgagaacaaggagcggatgccctttatccagtaa

SEQ ID NO: 423 - DNA, 2481 bp, Homo Sapiens
atgtgggcgctttgctcgctgctgcggtccgcggccggacgcaccatgtcgcagggacgcaccatatcgcaggcacccgcccgccgcgagcggccgcgcaaggacccgctgcggcacctgcgcacgcgagagaagcgcggaccgtcggggtgctccggcggcccaaacaccgtgtacctgcaggtggtggcagcgggtagccgggactcgggcgccgcgctctacgtcttctccgagttcaaccggtatctcttcaactgtggagaaggcgttcagagactcatgcaggagcacaagttaaaggttgctcgcctggacaacatattcctgacacgaatgcactggtctaatgttgggggcttaagtggaatgattcttactttaaaggaaaccgggcttccaaagtgtgtactttctggacctccacaactggaaaaatacctcgaagcaatcaaaatattttctggtccattgaaaggaatagaactggctgtgcggccccactctgccccagaatacgaggatgaaaccatgacagtttaccagatccccatacacagtgaacagaggaggggaaagcaccaaccatggcagagtccagaaaggcctctcagcaggctcagtccagagcgatcttcagactccgagtcgaatgaaaatgagccacaccttccacatggtgttagccagagaagaggggtcagggactcttccctggtcgtagctttcatctgtaagcttcacttaaagagaggaaacttcttggtgctcaaagcaaaggagatgggcctcccagttgggacagctgccatcgctcccatcattgctgctgtcaaggacgggaaaagcatcactcatgaaggaagagagattttggctgaagagctgtgtactcctccagatcctggtgctgcttttgtggtggtagaatgtccagatgaaagcttcattcaacccatctgtgagaatgccacctttcagaggtaccaaggaaaggcagatgcccccgtggccttggtggttcacatggccccagcatctgtgcttgtggacagcaggtaccagcagtggatggagaggtttgggcctgacacccagcacttggtcctgaatgagaactgtgcctcagttcacaaccttcgcagccacaagattcaaacccagctcaacctcatccacccggacatcttccccctgctcaccagtttccgctgtaagaaggagggccccaccctcagtgtgcccatggttcagggtgaatgcctcctcaagtaccagctccgtcccaggagggagtggcagagggatgccattattacttgcaatcctgaggaattcatagttgaggcgctgcagcttcccaacttccagcagagcgtgcaggagtacaggaggagtgcgcaggacggcccagccccagcagagaaaagaagtcagtacccagaaatcatcttccttggaacagggtctgccatcccgatgaagattcgaaatgtcagtgccacacttgtcaacataagccccgacacgtctctgctactggactgtggtgagggcacatttgggcagctgtgccgtcattacggagaccaggtggacagggtcctgggcaccctggctgctgtgtttgtgtcccacctgcacgcagatcaccacacgggcttgccaagtatcttgctgcagagagaacgcgccttggcatctttgggaaagccgcttcaccctttgctggtggttgcccccaaccagctcaaagcctggctccagcagtaccacaaccagtgccaggaggtcctgcaccacatcagtatgattcctgccaaatgccttcaggaaggggctgagatctccagtcctgcagtggaaagattgatcagttcgctgttgcgaacatgtgatttggaagagtttcagacctgtctggtgcggcactgcaagcatgcgtttggctgtgcgctggtgcacacctctggctggaaagtggtctattccggggacaccatgccctgcgaggctctggtccggatggggaaagatgccaccctcctgatacatgaagccaccctggaagatggtttggaagaggaagcagtggaaaagacacacagcacaacgtcccaagccatcagcgtggggatgcggatgaacgcggagttcattatgctgaaccacttcagccagcgctatgccaaggtccccctcttcagccccaacttcagcgagaaagtgggagttgcctttgaccacatgaaggtctgctttggagactttccaacaatgcccaagctgattcccccactgaaagccctgtttgctggcgacatcgaggagatggaggagcgcagggagaagcgggagctgcggcaggtgcgggcggccctcctgtccagggagctggcaggcggcctggaggatggggagcctcagcagaagcgggcccacacagaggagccacaggccaagaaggtcagagcccagtga

SEQ ID NO: 424 - DNA, 990 bp, Homo Sapiens
atggcggaggctgcaactcccggaacaacagccacaacatcaggagcaggagcggcagcggcgacggcggcagcagcctcccccaccccgatccccacagtcaccgccccgtccctgggggcgggcggagggggcggcggcagcgacggcagcggcggcggctggactaaacaggtcacctgcaggtattttatgcatggggtttgtaaggaaggagacaactgtcgctactcgcatgacctctctgacagtccgtatagtgtagtgtgcaagtattttcagcgagggtactgtatttatggagaccgctgcagatatgaacatagcaaaccattgaaacaggaagaagcaactgctacagagctaactacaaagtcatcccttgctgcttcctcaagtctctcatcgatagttggaccacttgttgaaatgaatacaggcgaagctgagtcaagaaattcaaactttgcaactgtaggagcaggttcagaggactgggtgaatgctattgagtttgttcctgggcaaccctactgtggccgtactgcgccttcctgcactgaagcacccctgcagggctcagtgaccaaggaagaatcagagaaagagcaaaccgccgtggagacaaagaagcagctgtgcccctatgctgcagtgggagagtgccgatacggggagaactgtgtgtatctccacggagattcttgtgacatgtgtgggctgcaggtcctgcatccaatggatgctgcccagagatcgcagcatatcaaatcgtgcattgaggcccatgagaaggacatggagctctcatttgccgtgcagcgcagcaaggacatggtgtgtgggatctgcatggaggtggtctatgagaaagccaaccccagtgagcgccgcttcgggatcctctccaactgcaaccacacctactgtctcaagtgcattcgcaagtggaggagtgctaagcaatttgagagcaagatcataaagtga

SEQ ID NO: 425 - DNA, 1674 bp, Homo Sapiens
atgccggagcgagatagtgagccgttctccaaccctttggcccccgatggccacgatgtggatgatcctcactccttccaccaatcaaaactcaccaatgaagacttcaggaaacttctcatgacccccagggctgcacctacctctgcaccaccttctaagtcacgtcaccatgagatgccaagggagtacaatgaggatgaagacccagctgcacgaaggaggaaaaagaaaagttattatgccaagctacgccaacaagaaattgagagagagagagagctagcagagaagtaccgggatcgtgccaaggaacggagagatggagtgaacaaagattatgaagaaaccgagcttatcagcaccacagctaactatagggctgttggccccactgctgaggcggacaaatcagctgcagagaagagaagacagttgatccaggagtccaaattcttgggtggtgacatggaacacacccatttggtgaaaggcttggattttgctctgcttcaaaaggtacgagctgagattgccagcaaagagaaagaggaagaggaactgatggaaaagccccagaaagaaaccaagaaagatgaggatcctgaaaataaaattgaatttaaaacacgtctgggccgcaatgtttaccgaatgctttttaagagcaaagcatatgagcggaatgagttgttcctgccgggccgcatggcctatgtggtagacctggatgatgagtatgctgacacagatatccccaccactcttatccgcagcaaggctgattgccccaccatggaggcccagaccacactgaccacaaatgacattgtcattagcaagctgacccagatcctttcatacctgaggcagggaacccgtaacaagaagcttaagaagaaggataaagggaagctggaagagaagaaacctcctgaggctgacatgaatatttttgaagacattggggattacgtaccctccacaaccaagacacctcgggacaaggagcgggagagatatcgggaacgggagcgtgatcgggaaagagacagagaccgtgaccgagagcgagagcgagaacgagatcgggaacgagagcgagagcgggaccgagagagagaagaggaaaagaagagacacagctactttgagaagccaaaagtagatgatgagcccatggacgttgacaaaggacctgggtctaccaaggagttgatcaagtccatcaatgaaaagtttgctgggtctgctggctgggaaggcacagaatcgctgaagaagccagaagacaaaaagcagctgggagatttctttggcatgtccaacagttatgcagagtgctacccagccacgatggatgacatggctgtggatagtgatgaggaggtggattatagcaaaatggaccagggtaacaagaaggggcccttaggccgttgggactttgatacccaggaagaatacagcgagtatatgaacaacaaagaagctttgcccaaggctgcattccagtatggtatcaaaatgtctgaagggcggaaaaccaggcgcttcaaggaaaccaatgacaaagcagagcttgatcgccagtggaagaagattagtgcaatcattgagaagaggaagaagatggaagctgatggggttgaagtcaaaagaccaaaatactaa

SEQ ID NO: 426 - DNA, 4515 bp, Homo Sapiens
atggcgaccgcgcgcaccttcgggcccgagcgggaagccgagccggccaaggaagcgcgcgtcgtgggctcggagcttgtggacacttatacggtttacatcatccaggtcactgatggcagccatgagtggacagtaaagcaccgctacagcgacttccatgacctgcatgaaaagctcgttgcagagagaaagattgataaaaatctgcttccgcccaaaaagataattgggaaaaactcaagaagcttggtggagaagagggagaaggatctggaggtctacctccagaagctcctggctgccttccctggcgtgacccccagagtactggcccacttcttgcattttcacttctatgagataaatggcatcaccgcggcactggctgaagagctctttgagaaaggagaacagctcctgggggccggcgaggtctttgccattggacccctgcagctgtatgccgtcacggagcagctgcagcagggaaagcccacgtgcgccagtggggatgccaagaccgacctcgggcacatcctggacttcacctgtcgccttaagtaccttaaggtttctggcacagaaggaccttttgggaccagcaacattcaggagcagctcctgccgttcgacctatcaatattcaagtccctgcatcaggtggagataagtcactgtgatgctaagcacatcagagggctggtcgcatcgaagcccaccttagccacgctgagtgtccgcttctcagcaacctcgatgaaggaagtccttgttcctgaagcctcagaatttgatgagtgggagcctgaaggcacaaccctagaaggccctgtgactgccgtcatccccacttggcaggcattgaccacgcttgacctgagccacaacagcatctccgagatcgacgagtctgtgaaactgatcccaaagattgagttcctggacctgagtcacaatggattgctggttgtggacaatctgcagcacctgtataaccttgtgcatctggacctgtcctacaacaagctctcctccttggaagggcttcacaccaagctggggaacatcaagaccttaaacctggcaggcaacctcctagagagtctgagtggcctgcacaagctctactcactggtcaacctggatctccgggacaacaggatcgaacagatggaggaggtccggagcataggcagcctcccgtgtctggagcacgtgtctctgctgaacaaccctctgagcatcatccccgactaccggaccaaggtgctggctcagttcggagagagggcctcagaggtctgtctggatgacacagtgaccacagagaaggagctggacactgtggaagtgctgaaagcaattcagaaagccaaggaggtcaagtccaaactgagcaacccagagaagaagggtggtgaagactcccggctctcagctgccccctgcatcagacccagcagctcccctcccactgtggctcccgcatctgcctccctgccccagcccatcctctctaaccaaggaatcatgttcgttcaggaggaggccctggccagcagcctctcgtccactgacagtctgactcccgagcaccagcccattgcccagggatgttctgattccttggagtccatccctgcgggacaggcagcttccgatgatttaagggacgtgccaggagctgttggtggtgcaagcccagaacatgccgagccggaggtccaggtggtgccggggtctggccagatcatcttcctgcccttcacctgcattggctacacggccaccaatcaggacttcatccagcgcctgagcacactgatccggcaggccatcgagcggcagctgcctgcctggatcgaggctgccaaccagcgggaggagggccagggtgaacagggcgaggaggaggatgaggaggaggaagaagaggaggacgtggctgagaaccgctactttgaaatggggcccccagacgtggaggaggaggagggaggaggccagggggaggaagaggaggaggaagaggaggatgaagaggccgaggaggagcgcctggctctggaatgggccctgggcgcggacgaggacttcctgctggagcacatccgcatcctcaaggtgctgtggtgcttcctgatccatgtgcagggcagtatccgccagttcgccgcctgccttgtgctcaccgacttcggcatcgcagtcttcgagatcccgcaccaggagtctcggggcagcagccagcacatcctctcctccctgcgctttgtcttttgcttcccgcatggcgacctcaccgagtttggcttcctcatgccggagctgtgtctggtgctcaaggtacggcacagtgagaacacgctcttcattatctcggacgccgccaacctgcacgagttccacgcggacctgcgctcatgctttgcaccccagcacatggccatgctgtgtagccccatcctctacggcagccacaccagcctgcaggagttcctgcgccagctgctcaccttctacaaggtggctggcggctgccaggagcgcagccagggctgcttccccgtctacctggtctacagtgacaagcgcatggtgcagacggccgccggggactactcaggcaacatcgagtgggccagctgcacactctgttcagccgtgcggcgctcctgctgcgcgccctctgaggccgtcaagtccgccgccatcccctactggctgttgctcacgccccagcacctcaacgtcatcaaggccgacttcaaccccatgcccaaccgtggcacccacaactgtcgcaaccgcaacagcttcaagctcagccgtgtgccgctctccaccgtgctgctggaccccacacgcagctgtacccagcctcggggcgcctttgctgatggccacgtgctagagctgctcgtggggtaccgctttgtcactgccatcttcgtgctgccccacgagaagttccacttcctgcgcgtctacaaccagctgcgggcctcgctgcaggacctgaagactgtggtcatcgccaagacccccgggacgggaggcagcccccagggctcctttgcggatggccagcctgccgagcgcagggccagcaatgaccagcgtccccaggaggtcccagcagaggctctggccccggccccagcggaagtcccagctccagcccctgcagcagcctcagcctcaggcccagcgaagactccggccccagcagaggcctcaacttcagctttggtcccagaggagacgccagtggaagctccagccccacccccagccgaggcccctgcccagtacccgagtgagcacctcatccaggccacctcggaggagaatcagatcccctcgcacttgcctgcctgcccgtcgctccggcacgtcgccagcctgcggggcagcgccatcatcgagctcttccacagcagcattgctgaggttgaaaacgaggagctgaggcacctcatgtggtcctcggtggtgttctaccagaccccagggctggaggtgactgcctgcgtgctgctctccaccaaggctgtgtactttgtgctccacgacggcctccgccgctacttctcagagccactgcaggatttctggcatcagaaaaacaccgactacaacaacagccctttccacatctcccagtgcttcgtgctaaagcttagtgacctgcagtcagtcaatgtggggcttttcgaccagcatttccggctgacgggttccaccccgatgcaggtggtcacgtgcttgacgcgggacagctacctgacgcactgcttcctccagcacctcatggtcgtgctgtcctctctggaacgcacgccctcgccggagcctgttgacaaggacttctactccgagtttgggaacaagaccacagggaagatggagaactacgagctgatccactctagtcgcgtcaagtttacctaccccagtgaggaggagattggggacctgacgttcactgtggcccaaaagatggctgagccagagaaggccccagccctcagcatcctgctgtacgtgcaggccttccaggtgggcatgccaccccctgggtgctgcaggggccccctgcgccccaagacactcctgctcaccagctccgagatcttcctcctggatgaggactgtgtccactacccactgcccgagtttgccaaagagccgccgcagagagacaggtaccggctggacgatggccgccgcgtccgggacctggaccgagtgctcatgggctaccagacctacccgcaggccctcaccctcgtcttcgatgacgtgcaaggtcatgacctcatgggcagtgtcaccctggaccactttggggaggtgccaggtggcccggctagagccagccagggccgtgaagtccagtggcaggtgtttgtccccagtgctgagagcagagagaagctcatctcgctgttggctcgccagtgggaggccctgtgtggccgtgagctgcctgtcgagctcaccggctag

SEQ ID NO: 427 - DNA, 1578 bp, Homo Sapiens
atgcacagagcgccttcccccacagccgagcagccgccgggcggaggggacagcgcccgccggaccctgcagcccagactcaagcccagtgcccgagccatggcactgcctcggacgctgggggagctgcagctgtaccgggtcctgcagcgcgccaacctcctttcctactatgagaccttcatccagcagggaggggacgacgtgcagcagctgtgtgaggcgggtgaggaggagtttctggagatcatggcacttgtgggcatggccaccaagcccctccatgtccggcgcctgcagaaggcactgagagagtgggccaccaatccagggctcttcagtcaaccagtgcctgctgttcccgtctccagcatcccgctcttcaagatctctgagactgcgggtacccggaaagggagcatgagcaatgggcatggcagcccaggggaaaaggcaggcagtgcccgcagttttagccccaagagcccccttgaacttggagagaagctatcaccactgcctgggggacctggggcaggggacccccggatctggccaggccggagcactccagagtcggacgttggggcaggaggagaagaggaggctggctcgccccccttctccccccctgcagggggaggagtccctgaggggactggggctggggggctggcagcaggtgggactgggggtggtccagaccgactggagccagagatggtacgcatggtggtggaaagtgtggagaggatcttccggagcttcccaaggggggatgctggggaggtcacatccctgctaaagctgaataagaagctggcacggagcgttgggcacatctttgagatggatgataatgacagccagaaggaagaggagatccgcaaatacagcatcatctatggccgtttcgactctaagcggcgggagggcaagcagctcagcctgcacgagctcaccatcaacgaggctgctgcccagttctgcatgagggacaacacgctcttattacggagagtggagctcttctctttgtcccgccaagtagcccgagagagcacctacttgtcctccttgaagggctccaggcttcaccctgaagaactgggaggccctccactgaagaagctgaaacaagaggttggagaacagagtcaccctgaaatccagcagcctcccccaggccctgagtcctatgtacccccataccgccccagcctggaggaggacagcgccagcctgtctggggagagtctggatggacatttgcaggctgtggggtcatgtccaaggctgacgccgccccctgctgacctgcctctggcattgccagcccatgggctatggagccgacacatcctgcagcagacactgatggacgaggggctgcggctcgcccgcctcgtctcccacgaccgcgtgggccgcctcagcccctgtgtgcctgcgaagccacctctcgcagagttcgaggaagggctgctggacagatgtcctgccccaggaccccatcccgcgctggtggagggtcgcaggagcagcgtgaaagtggaggctgaggccagccggcagtga

SEQ ID NO: 428 - DNA, 3693 bp, Homo Sapiens
atgtcggcactttgctggggccgcggagcggcggggctcaaacgagccctacggccttgcggccgcccgggactccccggcaaagaagggaccgccggtggcgtctgcggccccaggaggagctcgtccgccagcccccaggagcaagaccaagaccgcaggaaggactggggccacgtggagctgctggaggtgctccaggcgcgggtgcggcagctgcaggctgagagcgtgtcggaggtggtggtgaacagggtggatgtggcgcggctcccagaatgtggcagtggagatggtagcctccagccacccaggaaggtccagatgggggccaaggatgccaccccggtgccctgtggccgctgggcaaagatactggagaaggataagcggacccagcagatgcgtatgcagcggttgaaggcgaagctgcagatgccattccagagcggggagttcaaggcgctgaccaggcgcctgcaggtggagccccggctcctgagcaagcagatggccgggtgcctggaggactgcacgcgccaggcccccgagagcccctgggaggagcagctggcccggctgctgcaggaggcccctgggaagctgagcctcgatgtggagcaggccccgtcggggcagcactcgcaggcccagctctcaggtcagcagcagaggctcctggccttcttcaagtgctgcctgctcactgaccagctgcccctcgcccaccacctgctggtcgtccaccacggccagcggcagaagcggaagctgctcacgctggacatgtacaacgccgtgatgcttggctgggcgcggcagggtgccttcaaggagctggtatatgtgttattcatggtgaaggatgccggcttgactccggacctgctgtcctatgcggctgccctccagtgcatggggaggcaggaccaggacgccgggaccatcgaaaggtgtctggaacagatgagccaggaggggctgaagctgcaggcactcttcaccgccgttctgctgtctgaggaggatcgggccactgttctgaaggccgtgcacaaggtgaagcccaccttcagcctcccgccgcagctgccgcccccggtcaacacctccaagctgctcagggacgtgtatgccaaggatgggcgtgtgtcctacccgaagctgcacctgcccttgaagaccctgcagtgcctctttgagaagcagctccacatggagctggccagcagggtgtgcgtggtgtccgtggagaagcccacgttgccaagcaaggaggtcaagcacgcgcggaagaccctgaagaccctgcgggaccaatgggagaaagcactgtgccgggcgctgcgggagaccaagaaccgcctagagcgcgaggtgtacgagggccggttctcactttaccccttcctgtgcctgctggacgagcgcgaggtggtgcggatgctcctgcaggtcctgcaggcgctgcccgcccaaggtgagtccttcaccaccctggcccgggagctgagtgcgcgcactttcagccggcacgtggtgcagaggcagcgggtcagtggccaggtgcaggcgctgcagaaccactacaggaagtacctctgcttgctggcctccgacgccgaggtgcccgagccctgcctgccgcggcagtactgggaggagctgggggcgcccgaggccctgcgggagcagccctggcccctgccagtgcagatggagctgggcaagctgctggcggagatgctggtgcaggctacgcagatgccatgcagcctggacaagccgcatcgttcctctcggcttgtccccgtgctctaccacgtgtattccttccgcaacgtccagcagatcggcatcctgaagccgcacccggcctacgtgcagctgctggagaaggccgcggagcccacgctgaccttcgaggcggtggatgtacccatgctttgccccccgctgccctggacatcgccgcactctggtgctttcctgctcagccccaccaagctgatgcgcacggtggaaggcgccacgcagcaccaggagctgctggaaacctgcccgcccaccgcgctgcatggcgcactggacgccctcacccaactgggcaactgcgcctggcgcgtcaacgggcgcgtgctggacctggtgctgcagctcttccaggccaagggctgcccccagctaggcgtgccggccccgccctccgaggcgccccagccgcccgaggcccacctgccgcacagcgccgcgcccgcccgcaaggccgagctgcgccgtgagctggcgcactgccagaaggtggcccgggagatgcacagcctgcgggcggaggcgctgtaccgcctctcgctggcgcagcacctgcgggaccgcgtcttctggctgccgcacaacatggacttccgcggccgcacctacccctgcccgccgcacttcaaccacctgggcagcgacgtggcgcgggccctgctggagttcgcccagggccgcccgctcggcccgcacggcctggattggctcaagatccacctggtcaatctcacggggttgaagaagcgggagccgctgcggaagcgcctggcctttgcggaggaggtgatggatgacatcctggactccgcggaccaacccttgacgggccgaaagtggtggatgggcgcggaggaaccctggcagacgctggcctgctgtatggaggtggcgaacgctgtgcgcgcctccgaccctgccgcctatgtctcccacctccccgtccatcaggacggctcttgcaacggcctgcagcattatgctgctctgggccgcgacagcgtgggcgccgcctccgtcaacctggagccctcggatgtgccgcaggacgtgtacagcggcgtggccgcgcaggtggaggtgttccgtaggcaggacgcccagcggggcatgcgggtggcacaggtgctggaaggtttcatcacccgcaaggtggtgaagcagacggtgatgacggtggtgtacggggtcacgcgctatggcgggcgcctgcagattgagaagcgcctccgggagctgagcgactttccccaggagttcgtgtgggaggcctctcactatctcgtacgccaggtcttcaagagtctacaggagatgttctcggggacccgggccatccagcactggctgaccgagagtgcccgcctcatctcccacatgggctctgtggtggagtgggtcacacccctgggcgtccccgtcatccagccctatcgcctggactccaaggtcaagcaaataggaggtggaattcagagcatcacctacacccacaacggagacatcagccgaaagcccaacacacgtaagcagaagaacggcttcccgcccaacttcatccactcgctggactcctcccacatgatgctcaccgccctgcactgctacaggaagggcctgaccttcgtctctgtgcacgactgttactggactcacgcagctgatgtctccgtcatgaaccaggtgtgccgggagcagtttgtccgcttgcacagcgagcccatcctgcaggacctgtccagattcctggtcaagcggttctgctctgagccccagaagatcttggaggccagccagctgaaggagacactgcaggcggtgcccaagccaggggccttcgacctggagcaggtgaagcgttccacctacttcttcagctga

SEQ ID NO: 429 - DNA, 2241 bp, Homo Sapiens
atggcgggttcgcggggtgcggggcgcacggcggcgccgagcgtgcggccggagaagcggcggtctgagcccgaactggagcctgagcccgagccggagccccccctcctctgcacctctcctctcagccacagcaccggcagcgattctggcgtctccgacagcgaggagagtgtgttctcaggcctggaagattccggcagtgacagcagtgaggatgatgacgaaggcgacgaggagggagaggacggagcccttgatgacgagggccacagtgggattaaaaagaccactgaggagcaggtgcaggccagcactccttgcccgaggacagagatggcgagcgcccggattggggatgagtatgcggaggacagctctgatgaggaggacatccggaacacggtgggcaacgtgcccttggagtggtacgatgacttcccccacgtgggctacgacctggatggcaggcgcatctacaagcccctgcggacccgggatgagctggaccagttcctggacaagatggacgatcctgactactggcgcaccgtgcaggacccgatgacagggcgggacctgagactgacggatgagcaggtggccctggtgcggcggctgcagagtggccagtttggggatgtgggcttcaacccctatgagccggctgtcgacttcttcagcggggacgtcatgatccacccggtgaccaaccgcccggccgacaagcgcagcttcatcccctccctggtggagaaggagaaggtctctcgcatggtgcacgccatcaagatgggctggatccagcctcgccggccccgagaccccacccccagcttctatgacctgtgggcccaggaggaccccaacgccgtgctcgggcgccacaagatgcacgtacctgctcccaagctggccctgccaggccacgccgagtcgtacaacccaccccctgaatacctgctcagcgaggaggagcgcttggcgtgggaacagcaggagccaggcgagaggaagctgagctttttgccacgcaagttcccgagcctgcgggccgtgcctgcctacggacgcttcatccaggaacgcttcgagcgctgccttgacctgtacctgtgcccacggcagcgcaagatgagggtgaatgtagaccctgaggacctcatccccaagctgcctcggccgagggacctgcagcccttccccacgtgccaggccctggtctacaggggccacagtgaccttgtccggtgcctcagtgtctctcctgggggccagtggctggtttcaggctctgacgacggctccctgcggctctgggaggtggccactgcccgctgtgtgaggactgttcccgtggggggcgtggtgaagagtgtggcctggaaccccagccccgctgtctgcctggtggctgcagccgtggaggactcggtgctgctgctgaacccagctctgggggaccggctggtggcgggcagcacagatcagctgttgagcgccttcgtcccgcctgaggagccccccttgcagccggcccgctggctggaggcctcagaggaggagcgccaagtgggcctgcggctgcgcatctgccacgggaagccagtgacgcaggtgacctggcacgggcgtggggactacctggccgtggtgctggccacccaaggccacacccaggtgctgattcaccagctgagccgtcgccgcagccagagtccgttccgccgcagccacggacaggtgcagcgagtggccttccaccctgcccggcccttcctgttggtggcgtcccagcgcagcgtccgcctctaccacctgctgcgccaggagctcaccaagaagctgatgcccaactgcaagtgggtgtccagcctggcggtgcaccctgcaggtgacaacgtcatctgtgggagctacgatagcaagctggtgtggtttgacctggatctttccaccaagccatacaggatgctgagacaccacaagaaggctctgcgggctgtggccttccacccgcggtacccactctttgcgtcaggctcggacgacggcagtgtcatcgtctgccatggcatggtgtacaatgaccttctgcagaaccccttgctggtgcccgtcaaggtgctgaagggacacgtgctgacccgagatctgggagtgctggacgtcatcttccaccccacccagccgtgggtcttctcctcgggggcagacgggactgtccgcctcttcacctag

SEQ ID NO: 430 - DNA, 528 bp, Homo Sapiens
atgccgaagtcgtgcgcggcccggcagtgctgcaaccgctacagcagccgcaggaagcagctcaccttccaccggtttccgttcagccgcccggagctgctgaaggaatgggtgctgaacatcggccggggcaacttcaagcccaagcagcacacggtcatctgctccgagcacttccggccagagtgcttcagcgcctttggaaaccgcaagaacctaaagcacaatgccgtgcccacggtgttcgcctttcaggaccccacacagcaggtgagggagaacacagaccctgccagtgagagaggaaatgccagctcttctcagaaagaaaagacttcaccctgccgttcccaggtcctccctgaggcgggggccggagaggacagtcctgggagaaacatggacactgcacttgaagagcttcagttgcccccaaatgccgaaggccacgtaaaacaggcaatgttgtttaatgtagaaaatggaaccccagcttcacgtgaagccttgtggttgagtgaggagtga

SEQ ID NO: 431 - DNA, 2067 bp, Homo Sapiens
atggacggctccttcgtccagcacagtgtgagggttctgcaggagctcaacaagcagcgggagaagggccagtactgcgacgccactctggacgtggggggcctggtgtttaaggcacactggagtgtccttgcctgctgcagtcactttttccagagcctctacggggatggctcagggggcagtgtcgtcctccctgctggcttcgctgagatctttggcctcttgttggactttttctacactggtcacctcgctctcacctcagggaaccgggatcaggtgctcctggcagccagggagttgcgagtgccagaggccgtagagctgtgccagagcttcaagcccaaaacttcagtgggacaggcagcaggtggccagagtgggctggggccccctgcctcccagaatgtgaacagccacgtcaaggagccggcaggcttggaagaagaggaagtttcgaggactctgggtctagtccccagggatcaggagcccagaggcagtcatagtcctcagaggccccagctccattccccagctcagagtgagggcccctcctccctctgtgggaaactgaagcaggccttgaagccttgtccccttgaggacaagaaacccgaggactgcaaagtgcccccaaggcccttagaggctgaaggtgcccagctgcagggcggcagtaatgagtgggaagtggtggttcaagtggaggatgatggggatggcgattacatgtctgagcctgaggctgtgctgaccaggaggaagtcaaatgtaatccgaaagccctgtgcagctgagccagccctgagcgcgggctccctagcagctgagcctgctgagaacagaaaaggtacagcggtgccggtcgaatgccccacatgtcataaaaagttcctcagcaaatattatctaaaagtccacaacaggaaacatactggggagaaaccctttgagtgtcccaaatgtgggaagtgttactttcggaaggagaacctcctggagcatgaagcccggaattgcatgaaccgctcggaacaggtcttcacgtgctctgtgtgccaggagacattccgccgaaggatggagctgcgggtgcacatggtgtctcacacaggggagatgccctacaagtgttcctcctgctcccagcagttcatgcagaagaaggacttgcagagccacatgatcaaacttcatggagcccccaagccccatgcatgccccacctgtgccaagtgcttcctgtctcggacagagctgcagctgcatgaagctttcaagcaccgtggtgagaagctgtttgtgtgtgaggagtgtgggcaccgggcctcgagccggaatggcctgcagatgcacatcaaggccaagcacaggaatgagaggccacacgtatgtgagttctgcagccacgccttcacccaaaaggccaatctcaacatgcacctgcgcacacacacgggtgagaagcccttccagtgccacctctgtggcaagaccttccgaacccaagccagcctggacaagcacaaccgcacccacaccggggaaaggcccttcagttgcgagttctgtgaacagcgcttcactgagaaggggcccctcctgaggcacgtggccagccgccatcaggagggccggccccacttctgccagatatgcggcaagaccttcaaagccgtggagcaactgcgtgtgcacgtcagacggcacaagggggtgaggaagtttgagtgcaccgagtgtggctacaagtttacccgacaggcccacctgcggaggcacatggagatccacgaccgggtagagaactacaacccgcggcagcgcaagctccgcaacctgatcatcgaggacgagaagatggtggtggtggcgctgcagccgcctgcagagctggaggtgggctcggcggaggtcattgtggagtccctggcccagggcggcctggcctcccagctccccggccagagactgtgtgcagaggagagcttcaccggcccaggtgtcctggagccctccctcatcatcacagctgctgtccccgaggactgtgacacatag

SEQ ID NO: 432 - DNA, 990 bp, Homo Sapiens
atggctttccagctgagcaggatcatgcggccagatgatgccaacgtggccggcaatgtccacggggggaccatcctgaagatgatcgaggaggcaggcgccatcatcagcacccggcattgcaacagccagaacggggagcgctgtgtggccgccctggctcgtgtcgagcgcaccgacttcctgtctcccatgtgcatcggtgaggtggcgcatgtcagcgcggagatcacctacacctccaagcactctgtggaggtgcaggtcaacgtgatgtccgaaaacatcctcacaggtgccaaaaagctgaccaataaggccaccctgtggtatgtgcccctgtcgctgaagaatgtggacaaggtcctcgaggtgcctcctgttgtgtattcccggcaggagcaggaggaggagggccggaagcggtatgaagcccagaagctggagcgcatggagaccaagtggaggaacggggacatcgtccagccagtcctcaacccagagccgaacactgtcagctacagccagtccagcttgatccacctggtggggccttcagactgcaccctgcacggctttgtgcacggaggtgtgaccatgaagctcatggatgaggtcgccgggatcgtggctgcacgccactgcaagaccaacatcgtcacagcttccgtggacgccattaattttcatgacaagatcagaaaaggctgcgtcatcaccatctcgggacgcatgaccttcacgagcaataagtccatggagatcgaggtgttggtggacgccgaccctgttgtggacagctctcagaagcgctaccgggccgccagtgccttcttcacctacgtgtcgctgagccaggaaggcaggtcgctgcctgtgccccagctggtgcccgagaccgaggacgagaagaagcgctttgaggaaggcaaagggcggtacctgcagatgaaggcgaagcgacagggccacgcggagcctcagccctag

SEQ ID NO: 433 - DNA, 603 bp, Homo Sapiens
atggcccagcagagagccctgccccagagcaaggagacgctgctgcagtcctacaacaagcggctgaaggacgacattaagtccatcatggacaacttcaccgagatcatcaagaccgccaagattgaggacgagacgcaggtgtcacgggccactcagggtgaacaggacaattacgagatgcatgtgcgagccgccaacatcgtccgagccggcgagtccctgatgaagctggtgtccgacctcaagcagttcctgatcctcaatgacttcccctccgtgaacgaggccattgaccagcgcaaccagcagctgcgcacactgcaggaggagtgcgaccggaagctcatcacgctgcgagacgagatctccattgacctctacgagctggaggaggagtattactcgtccagctcaagcctttgcgaagctaatgacctgcctctgtgcgaagcttacgggaggctggacctcgacacagactctgctgatggcctctcggcccctctgctggcgtccccggagcccagtgctggccccctacaggtggcagcccctgcccactcccatgctggtggccctggccccactgagcacgcctga

SEQ ID NO: 434 - DNA, 9804 bp, Homo Sapiens
atgcagaaagcccggggcacgcgaggcgaggatgcgggcacgagggcaccccccagccccggagtgcccccgaaaagggccaaggtgggggccggcggcggggctcctgtggccgtggccggggcgccagtcttcctgcggcccctgaagaacgcggcggtgtgcgcgggcagcgacgtgcggctgcgggtggtggtgagcgggacgccccagcccagcctccgctggttccgggatgggcagctcctgcccgcgccggcccccgagcccagctgcctgtggctgcggcgctgcggggcgcaggacgccggcgtgtacagctgcatggcccagaacgagcggggccgggcctcctgcgaggcggtgctcacagtgctggaggtcggagactcagagacggctgaggatgacatcagcgatgtgcagggaacccagcgcctggagcttcgggatgacggggccttcagcacccccacggggggttctgacaccctggtgggcacctccctggacacacccccgacctccgtgacaggcacctcagaggagcaagtgagctggtggggcagcgggcagacggtcctggagcaggaagcgggcagtgggggtggcacccgccgcctcccgggcagcccaaggcaagcacaggcaaccggggccgggccacggcacctgggggtggagccgctggtgcgggcatctcgagctaatctggtgggcgcaagctgggggtcagaggatagcctttccgtggccagtgacctgtacggcagcgcattcagcctgtacagaggacgggcgctctctatccacgtcagcgtccctcagagcgggttgcgcagggaggagcccgaccttcagcctcaactggccagcgaagccccacgccgccctgcccagccgcctccttccaaatccgcgctgctccccccaccgtcccctcgggtcgggaagcggtccccgccgggacccccggcccagcccgcggccacccccacgtcgccccaccgtcgcactcaggagcctgtgctgcccgaggacaccaccaccgaagagaagcgagggaagaagtccaagtcgtccgggccctccctggcgggcaccgcggaatcccgaccccagacgccactgagcgaggcctcaggccgcctgtcggcgttgggccgatcgcctaggctggtgcgcgccggctcccgcatcctggacaagctgcagttcttcgaggagcgacggcgcagcctggagcgcagcgactcgccgccggcgcccctgcggccctgggtgcccctgcgcaaggcccgctctctggagcagcccaagtcggagcgcggcgcaccgtggggcacccccggggcctcgcaggaagaactgcgggcgccaggcagcgtggccgagcggcgccgcctgttccagcagaaagcggcctcgctggacgagcgcacgcgtcagcgcagcccggcctcagacctcgagctgcgcttcgcccaggagctgggccgcatccgccgctccacgtcgcgggaggagctggtgcgctcgcacgagtccctgcgcgccacgctgcagcgtgccccatcccctcgagagcccggcgagcccccgctcttctctcggccctccacccccaagacatcgcgggccgtgagccccgccgccgcccagccgccctctccgagcagcgcggagaagccgggggacgagcctgggaggcccaggagccgcgggccggcgggcaggacagagccgggggaaggcccgcagcaggaggttaggcgtcgggaccaattcccgctgacccggagcagagccatccaggagtgcaggagccctgtgccgccccccgccgccgatcccccagaggccaggacgaaagcaccccccggtcggaagcgggagcccccggcgcaggccgtgcgcttcctgccctgggccacgccgggcctggagggcgctgctgtaccccagaccttggagaagaacagggcggggcctgaggcagagaagaggcttcgcagagggccggaggaggacggtccctgggggccctgggaccgccgaggggcccgcagccagggcaaaggtcgccgggcccggcccacctcccctgagctcgagtcttcggatgactcctacgtgtccgctggagaagagcccctagaggcccctgtgtttgagatccccctgcagaatgtggtggtggcaccaggggcagatgtgctgctcaagtgtatcatcactgccaaccccccgccccaagtgtcctggcacaaggatgggtcagcgctgcgcagcgagggccgcctcctcctccgggctgagggtgagcggcacaccctgctgctcagggaggccagggcagcagatgccgggagctatatggccaccgccaccaacgagctgggccaggccacctgtgccgcctcactgaccgtgagacccggtgggtctacatcccctttcagcagccccatcacctccgacgaggaatacctgagccccccagaggagttcccagagcctggggagacctggccgcgaacccccaccatgaagcccagtcccagccagaaccgccgttcttctgacactggctccaaggcaccccccaccttcaaggtctcacttatggaccagtcagtaagagaaggccaagatgtcatcatgagcatccgcgtgcagggggagcccaagcctgtggtctcctggctgagaaaccgccagcccgtgcgcccagaccagcggcgctttgcggaggaggctgagggtgggctgtgccggctgcggatcctggctgcagagcgtggcgatgctggtttctacacttgcaaagcggtcaatgagtatggtgctcggcagtgcgaggcccgcttggaggtccgagcacaccctgaaagccggtccctggccgtgctggcccccctgcaggacgtggacgtgggggccggggagatggcgctgtttgagtgcctggtggcggggcccactgacgtggaggtggattggctgtgccgtggccgcctgctgcagcctgcactgctcaaatgcaagatgcatttcgatggccgcaaatgcaagctgctacttacatctgtacatgaggacgacagtggcgtctacacctgcaagctcagcacggccaaagatgagctgacctgcagtgcccggctgaccgtgcggccctcgttggcacccctgttcacacggctgctggaagatgtggaggtgttggagggccgagctgcccgtttcgactgcaagatcagtggcaccccgccccctgttgttacctggactcattttggctgccccatggaggagagtgagaacttgcggctgcggcaggacgggggtctgcactcactgcacattgcccatgtgggcagcgaggacgaggggctctatgcggtcagtgctgttaacacccatggccaggcccactgctcagcccagctgtatgtagaagagccccggacagccgcctcaggccccagctcgaagctggagaagatgccatccattcccgaggagccagagcagggtgagctggagcggctgtccattcctgacttcctgcggccactgcaggacctggaggtgggactggccaaggaggccatgctagagtgccaggtgaccggcctgccctaccccaccatcagctggttccacaatggccaccgcatccagagcagcgacgaccggcgcatgacacagtacagggatgtccatcgcttggtgttccctgccgtggggcctcagcacgccggtgtctacaagagcgtcattgccaacaagctgggcaaagctgcctgctatgcccacctgtatgtcacagatgtggtcccaggccctccagatggcgccccgcaggtggtggctgtgacggggaggatggtcacactcacatggaacccccccaggagtctggacatggccatcgacccggactccctgacgtacacagtgcagcaccaggtgctgggctcggaccagtggacggcactggtcacaggcctgcgggagccagggtgggcagccacagggctgcgtaagggggtccagcacatcttccgggtcctcagcaccactgtcaagagcagcagcaagccctcacccccttctgagcctgtgcagctgctggagcacggcccaaccctggaggaggcccctgccatgctggacaaaccagacatcgtgtatgtggtggagggacagcctgccagcgtcaccgtcacattcaaccatgtggaggcccaggtcgtctggaggagctgccgaggggccctcctagaggcacgggccggtgtgtacgagctgagccagccagatgatgaccagtactgtcttcggatctgccgggtgagccgccgggacatgggggccctcacctgcaccgcccgaaaccgtcacggcacacagacctgctcggtcacattggagctggcagaggcccctcggtttgagtccatcatggaggacgtggaggtgggggctggggaaactgctcgctttgcggtggtggtcgagggaaaaccactgccggacatcatgtggtacaaggacgaggtgctgctgaccgagagcagccatgtgagcttcgtgtacgaggagaatgagtgctccctggtggtgctcagcacgggggcccaggatggaggcgtctacacctgcaccgcccagaacctggcgggtgaggtctcctgcaaagcagagttggctgtgcattcagctcagacagctatggaggtcgagggggtcggggaggatgaggaccatcgaggaaggagactcagcgacttttatgacatccaccaggagatcggcaggggtgctttctcctacttgcggcgcatagtggagcgtagctccggcctggagtttgcggccaagttcatccccagccaggccaagccaaaggcatcagcgcgtcgggaggcccggctgctggccaggctccagcacgactgtgtcctctacttccatgaggccttcgagaggcgccggggactggtcattgtcaccgagctctgcacagaggagctgctggagcgaatcgccaggaaacccaccgtgtgtgagtctgagatccgggcctatatgcggcaggtgctagagggaatacactacctgcaccagagccacgtgctgcacctcgatgtcaagcctgagaacctgctggtgtgggatggtgctgcgggcgagcagcaggtgcggatctgtgactttgggaatgcccaggagctgactccaggagagccccagtactgccagtatggcacacctgagtttgtagcacccgagattgtcaatcagagccccgtgtctggagtcactgacatctggcctgtgggtgttgttgccttcctctgtctgacaggaatctccccgtttgttggggaaaatgaccggacaacattgatgaacatccgaaactacaacgtggccttcgaggagaccacattcctgagcctgagcagggaggcccggggcttcctcatcaaagtgttggtgcaggaccggctgagacctaccgcagaagagaccctagaacatccttggttcaaaactcaggcaaagggcgcagaggtgagcacggatcacctgaagctattcctctcccggcggaggtggcagcgctcccagatcagctacaaatgccacctggtgctgcgccccatccccgagctgctgcgggcccccccagagcgggtgtgggtgaccatgcccagaaggccaccccccagtggggggctctcatcctcctcggattctgaagaggaagagctggaagagctgccctcagtgccccgcccactgcagcccgagttctctggctcccgggtgtccctcacagacattcccactgaggatgaggccctggggaccccagagactggggctgccacccccatggactggcaggagcagggaagggctccctctcaggaccaggaggctcccagcccagaggccctcccctccccaggccaggagcccgcagctggggctagccccaggcggggagagctccgcaggggcagctcggctgagagcgccctgccccgggccgggccgcgggagctgggccggggcctgcacaaggcggcgtctgtggagctgccgcagcgccggagccccagcccgggagccacccgcctggcccggggaggcctgggtgagggcgagtatgcccagaggctgcaggccctgcgccagcggctgctgcggggaggccccgaggatggcaaggtcagcggcctcaggggtcccctgctggagagcctggggggccgtgctcgggacccccggatggcacgagctgcctccagcgaggcagcgccccaccaccagcccccactcgagaaccggggcctgcaaaagagcagcagcttctcccagggtgaggcggagccccggggccggcaccgccgagcgggggcgcccctcgagatccccgtggccaggcttggggcccgtaggctacaggagtctccttccctgtctgccctcagcgaggcccagccatccagccctgcacggcccagcgcccccaaacccagtacccctaagtctgcagaaccttctgccaccacacctagtgatgctccgcagccccccgcaccccagcctgcccaagacaaggctccagagcccaggccagaaccagtccgagcctccaagcctgcaccacccccccaggccctgcaaaccctagcgctgcccctcacaccctatgctcagatcattcagtccctccagctgtcaggccacgcccagggcccctcgcagggccctgccgcgccgccttcagagcccaagccccacgctgctgtctttgccagggtggcctccccacctccgggagcccccgagaagcgcgtgccctcagccgggggtcccccggtgctagccgagaaagcccgagttcccacggtgccccccaggccaggcagcagtctcagtagcagcatcgaaaacttggagtcggaggccgtgttcgaggccaagttcaagcgcagccgcgagtcgcccctgtcgctggggctgcggctgctgagccgttcgcgctcggaggagcgcggccccttccgtggggccgaggaggaggatggcatataccggcccagcccggcggggaccccgctggagctggtgcgacggcctgagcgctcacgctcggtgcaggacctcagggctgtcggagagcctggcctcgtccgccgcctctcgctgtcactgtcccagcggctgcggcggacccctcccgcgcagcgccacccggcctgggaggcccgcggcggggacggagagagctcggagggcgggagctcggcgcggggctccccggtgctggcgatgcgcaggcggctgagcttcaccctggagcggctgtccagccgattgcagcgcagtggcagcagcgaggactcggggggcgcgtcgggccgcagcacgccgctgttcggacggcttcgcagggccacgtccgagggcgagagtctgcggcgccttggccttccgcacaaccagttggccgcccaggccggcgccaccacgccttccgccgagtccctgggctccgaggccagcgccacgtcgggctcctcagccccaggggaaagccgaagccggctccgctggggcttctctcggccgcggaaggacaaggggttatcgccaccaaacctctctgccagcgtccaggaggagttgggtcaccagtacgtgcgcagtgagtcagacttccccccagtcttccacatcaaactcaaggaccaggtgctgctggagggggaggcagccaccctgctctgcctgccagcggcctgccctgcaccgcacatctcctggatgaaagacaagaagtccttgaggtcagagccctcagtgatcatcgtgtcctgcaaagatgggcggcagctgctcagcatcccccgggcgggcaagcggcacgccggtctctatgagtgctcggccaccaacgtactgggcagcatcaccagctcctgtaccgtggctgtggcccgagtcccaggaaagctagctcctccagaggtaccccagacctaccaggacacggcgctggtgctgtggaagccgggagacagccgggcaccttgcacgtatacgctggagcggcgagtggatggggagtctgtgtggcaccctgtgagctcaggcatccccgactgttactacaacgtgacccacctgccagttggcgtgactgtgaggttccgtgtggcctgtgccaaccgtgctgggcaggggcccttcagcaactcttctgagaaggtctttgtcaggggtactcaagattcttcagctgtgccatctgctgcccaccaagaggcccctgtcacctcaaggccagccagggcccggcctcctgactctcctacctcactggccccacccctagctcctgctgcccccacacccccgtcagtcactgtcagcccctcatctccccccacacctcctagccaggccttgtcctcgctcaaggctgtgggtccaccaccccaaacccctccacgaagacacaggggcctgcaggctgcccggccagcggagcccaccctacccagtacccacgtcaccccaagtgagcccaagcctttcgtccttgacactgggaccccgatcccagcctccactcctcaaggggttaaaccagtgtcttcctctactcctgtgtatgtggtgacttcctttgtgtctgcaccaccagcccctgagcccccagcccctgagccccctcctgagcctaccaaggtgactgtgcagagcctcagcccggccaaggaggtggtcagctcccctgggagcagtccccgaagctctcccaggcctgagggtaccactcttcgacagggtccccctcagaaaccctacaccttcctggaggagaaagccaggggccgctttggtgttgtgcgagcgtgccgggagaatgccacggggcgaacgttcgtggccaagatcgtgccctatgctgccgagggcaagcggcgggtcctgcaggagtacgaggtgctgcggaccctgcaccacgagcggatcatgtccctgcacgaggcctacatcacccctcggtacctcgtgctcattgctgagagctgtggcaaccgggaactcctctgtgggctcagtgacaggttccggtattctgaggatgacgtggccacttacatggtgcagctgctacaaggcctggactacctccacggccaccacgtgctccacctagacatcaagccagacaacctgctgctggcccctgacaatgccctcaagattgtggactttggcagtgcccagccctacaacccccaggcccttaggccccttggccaccgcacgggcacgctggagttcatggctccggagatggtgaagggagaacccatcggctctgccacggacatctggggagcgggtgtgctcacttacattatgctcagtggacgctccccgttctatgagccagacccccaggaaacggaggctcggattgtggggggccgctttgatgccttccagctgtaccccaatacatcccagagcgccaccctcttcttgcgaaaggttctctctgtacatccctggagccggccctccctgcaggactgcctggcccacccatggttgcaggacgcctacctgatgaagctgcgccgccagacgctcaccttcaccaccaaccggctcaaggagttcctgggcgagcagcggcggcgccgggctgaggctgccacccgccacaaggtgctgctgcgctcctaccctggcggcccctag

SEQ ID NO: 435 - DNA, 1368 bp, Homo Sapiens
atgggggcctgcctgggagcctgctccctgctcagctgcgcgtcctgcctctgcggctctgccccctgcatcctgtgcagctgctgccccgccagccgcaactccaccgtgagccgcctcatcttcacgttcttcctcttcctgggggtgctggtgtccatcattatgctgagcccgggcgtggagagtcagctctacaagctgccctgggtgtgtgaggagggggccgggatccccaccgtcctgcagggccacatcgactgtggctccctgcttggctaccgcgctgtctaccgcatgtgcttcgccacggcggccttcttcttctttttcaccctgctcatgctctgcgtgagcagcagccgggacccccgggctgccatccagaatgggttttggttctttaagttcctgatcctggtgggcctcaccgtgggtgccttctacattcctgacggctccttcaccaacatctggttctacttcggcgtcgtgggctccttcctcttcatcctcatccagctggtgctgctcatcgactttgcgcactcctggaaccagcggtggctgggcaaggccgaggagtgcgattcccgtgcctggtacgcaggcctcttcttcttcactctcctcttctacttgctgtcgatcgcggccgtggcgctgatgttcatgtactacactgagcccagcggctgccacgagggcaaggtcttcatcagcctcaacctcaccttctgtgtctgcgtgtccatcgctgctgtcctgcccaaggtccaggacgcccagcccaactcgggtctgctgcaggcctcggtcatcaccctctacaccatgtttgtcacctggtcagccctatccagtatccctgaacagaaatgcaacccccatttgccaacccagctgggcaacgagacagttgtggcaggccccgagggctatgagacccagtggtgggatgccccgagcattgtgggcctcatcatcttcctcctgtgcaccctcttcatcagtctgcgctcctcagaccaccggcaggtgaacagcctgatgcagaccgaggagtgcccacctatgctagacgccacacagcagcagcagcaggtggcagcctgtgagggccgggcctttgacaacgagcaggacggcgtcacctacagctactccttcttccacttctgcctggtgctggcctcactgcacgtcatgatgacgctcaccaactggtacaagcccggtgagacccggaagatgatcagcacgtggaccgccgtgtgggtgaagatctgtgccagctgggcagggctgctcctctacctgtggaccctggtagccccactcctcctgcgcaaccgcgacttcagctga

SEQ ID NO: 436 - DNA, 1125 bp, Homo Sapiens
atgagcgtcccggccttcatcgacatcagtgaagaagatcaggctgctgagcttcgtgcttatctgaaatctaaaggagctgagatttcagaagagaactcggaaggtggacttcatgttgatttagctcaaattattgaagcctgtgatgtgtgtctgaaggaggatgataaagatgttgaaagtgtgatgaacagtgtggtatccctactcttgatcctggaaccagacaagcaagaagctttgattgaaagcctatgtgaaaagctggtcaaatttcgcgaaggtgaacgcccgtctctgagactgcagttgttaagcaaccttttccacgggatggataagaatactcctgtaagatacacagtgtattgcagccttattaaagtggcagcatcttgtggggccatccagtacatcccaactgagctggatcaagttagaaaatggatttctgactggaatctcaccactgaaaaaaagcacacccttttaagactactttatgaggcacttgtggattgtaagaagagtgatgctgcttcaaaagtcatggtggaattgctcggaagttacacagaggacaatgcttcccaggctcgagttgatgcccacaggtgtattgtacgagcattgaaagatccaaatgcatttctttttgaccaccttcttactttaaaaccagtcaagtttttggaaggcgagcttattcatgatcttttaaccatttttgtgagtgctaaattggcatcatatgtcaagttttatcagaataataaagacttcattgattcacttggcctgttacatgaacagaatatggcaaaaatgagactacttacttttatgggaatggcagtagaaaataaggaaatttcttttgacacaatgcagcaagaacttcagattggagctgatgatgttgaagcatttgttattgacgccgtaagaactaaaatggtctactgcaaaattgatcagacccagagaaaagtagttgtcagtcatagcacacatcggacatttggaaaacagcagtggcaacaactgtatgacacacttaatgcctggaaacaaaatctgaacaaagtgaaaaacagccttttgagtctttctgatacctga

SEQ ID NO: 437 - DNA, 918 bp, Homo Sapiens
atggagcgtcttgtcgcccgtgggaccttcccagtactagtgcgcaccagcgcctgccgcagcctcttcgggccggtggaccacgaggagctgagccgcgagctgcaggcccgcctggccgagctgaacgccgaggaccagaaccgctgggattacgacttccagcaggacatgccgctgcggggccctggacgcctgcagtggaccgaagtggacagcgactcggtgcccgcgttctaccgcgagacggtgcaggtggggcgctgccgcctgctgctggcgccgcggcccgtcgcggtcgcggtggctgtcagcccgcccctcgagccggccgctgagtccctcgacggcctcgaggaggcgccggagcagctgcctagtgtcccggtcccggccccggcgtccaccccgcccccagtcccggtcctggctccagccccggccccggctccggctccggtcgcggctccggtcgcggctccggtcgcggtcgcggtcctggccccggccccggccccggctccggctccggctccggccccggctccagtcgcggccccggccccagccccggccccggccccggccccggcccccgccccggccccggccccggacgcggcgcctcaagagagcgccgagcagggcgcgaaccaggggcagcgcggccaggagcctctcgctgaccagctgcactcggggatttcgggacgtcccgcggccggcaccgcggccgccagcgccaacggcgcggcgatcaagaagctgtccgggcctctgatctccgatttcttcgccaagcgcaagagatcagcgcctgagaagtcgtcgggcgatgtccccgcgccgtgtccctctccaagcgccgcccctggcgtgggctcggtggagcagaccccgcgcaagaggctgcggtga

SEQ ID NO: 438 - DNA, 1302 bp, Homo Sapiens
atggcaacatcaggtgactgtcccagaagtgaatcgcagggagaagagcctgctgagtgcagtgaggccggtctcctgcaggagggagtacagccagaggagtttgtggccatcgcggactacgctgccaccgatgagacccagctcagttttttgagaggagaaaaaattcttatcctgagacaaaccactgcagattggtggtggggtgagcgtgcgggctgctgtgggtacattccggcaaaccatgtggggaagcacgtggatgagtacgaccccgaggacacgtggcaggatgaagagtacttcggcagctatggaactctgaaactccacttggagatgttggcagaccagccacgaacaactaaataccacagtgtcatcctgcagaataaagaatccctgacggataaagtcatcctggacgtgggctgtgggactgggatcatcagtctcttctgtgcacactatgcgcggcctagagcggtgtacgcggtggaggccagtgagatggcacagcacacggggcagctggtcctgcagaacggctttgctgacatcatcaccgtgtaccagcagaaggtggaggatgtggtgctgcccgagaaggtggacgtgctggtgtctgagtggatggggacctgcctgctgtttgagttcatgatcgagtccatcctgtatgcccgggatgcctggctgaaggaggacggggtcatttggcccaccatggctgcgttgcaccttgtgccctgcagtgctgataaggattatcgtagcaaggtgctcttctgggacaacgcgtacgagttcaacctcagcgctctgaaatctttagcagttaaggagtttttttcaaagcccaagtataaccacattttgaaaccagaagactgtctctctgaaccgtgcactatattgcagttggacatgagaaccgtgcaaatttctgatctagagaccctgaggggcgagctgcgcttcgacatcaggaaggcggggaccctgcacggcttcacggcctggtttagcgtccacttccagagcctgcaggaggggcagccgccgcaggtgctcagcaccgggcccttccaccccaccacacactggaagcagacgctgttcatgatggacgacccagtccctgtccatacaggagacgtggtcacgggttcagttgtgttgcagagaaacccagtgtggagaaggcacatgtctgtggctctgagctgggctgtcacttccagacaagaccccacatctcaaaaagttggagaaaaagtcttccccatctggagatga

SEQ ID NO: 439 - DNA, 1020 bp, Homo Sapiens
atgatggattctcagctggtagctggtgttgcattcaagaagactttctcttacgctgggtttgaaatgcaacccaaaaagtaccacaatcccaagattgcccttttgaatgtcgagctcgagttgaaagctgagaaagacaatgctgagataagagtccacacagttgaggattatcaggcaattgttgatgctgagtggaacattctctatgacaagttagagaagatccatcattctggagccaaagttgtcttgtccaaactccccattggggatgtggccacccagtactttgctgacagggacatgttctgtgctggccgagtacctgaggaggatctgaagaggacaatgatggcctgtggaggctcaatccagaccagtgtgaatgctctgtcagcagatgtgctgggtcgatgccaggtgtttgaagagacccagattggaggcgagaggtacaatttttttactggctgccccaaggccaagacatgcaccttcattctccgtggcggcgccgagcagtttatggaggagacagagcggtccctgcatgatgccatcatgatcgtcaggagggccatcaagaatgattcagtggtggctggtggcggggccattgagatggaactctccaagtacctgcgggattactcaaggactattccaggaaaacagcagctgttgattggggcatatgccaaggccttggagattatcccacgccagctgtgtgacaatgctggctttgatgccacaaacattctcaacaagctgcgggctcggcatgcccaggggggtacatggtatggagtagacatcaacaacgaggacattgctgacaactttgaagctttcgtgtgggagccagctatggtgcggatcaatgcgctgacagcagcctctgaggctgcgtgcctgatcgtgtctgtagatgaaaccatcaagaacccccgctcgactgtggatgctcccacagcagcaggccggggccgtggtcgtggccgcccccactga

SEQ ID NO: 440 - DNA, 3192 bp, Homo Sapiens
atgcctcatttgcctctcgcctcttttcgaccaccattttgggggctgaggcactcacggggcctccccaggtttcactccgtttctacacagtcggagccccatggatctcccatctcccggaggaaccgtgaagccaaacagaagcgcctgcgagagaagcaggcgactctggaggctgagatagcaggggagagcaagtcacctgcagaatccattaaggcctggaggcctaaggagttagtattgtatgaaatccctacgaaacccggtgaaaagaaagatgtctctgggcccctgcctcctgcatacagcccccgatatgttgaggctgcctggtacccgtggtgggtacgagagggcttcttcaaaccagaatatcaggcccggctgccccaagctacaggggagaccttttccatgtgtatcccacctcccaatgtcactggctccctgcacattggccacgcactcacggtggccatacaggatgccctcgtgcgctggcaccggatgcgtggggatcaagtgctgtgggtccctggttcagatcatgcaggaattgctacacaagctgtggtggagaaacaactgtggaaggaacggggagtgaggagacatgagctgagccgggaggccttccttagggaggtgtggcagtggaaggaggcgaaaggtggagagatctgtgagcagctgcgagctctgggtgcctccctggactgggatcgagagtgttttaccatggatgttggctcctcagtggctgtgactgaagcttttgtgcggctctacaaggcggggttgctgtaccggaaccatcagcttgtcaactggtcatgtgctttaagatcagccatctcggacattgaggtggagaaccggcccctgcctggccacacacagcttcgactgcctggctgccccacccccgtgtcttttggcctcctattttctgttgccttccccgtggatggagagcctgatgcagaggttgtggtaggaaccacaaggccagagacgctgcctggagatgtggctgtggccgttcatccagacgactcgcgatacacacatctacacgggcgacagcttcgtcaccccttgatggggcagcctcttcccctcatcacagactatgctgttcagccacatgtgggcacgggggcagtgaaggtgactccagctcacagtcctgccgatgctgagatgggggcccgacatggcttgagccccttgaatgtcattgcggaggatgggaccatgacctccctctgcggggactggctgcagggtcttcaccggtttgtggcccgggaaaagataatgtctgtgctgagtgaatggggcctgttccggggcctccagaaccaccccatggtactgcccatctgcagccgttctggggatgtgatagaatacctgctgaagaaccagtggtttgtccgctgccaggaaatgggggcccgagctgccaaggctgtggagtcgggggccctggagctcagtccctccttccaccagaagaactggcagcactggttttcccatattggggactggtgtgtctcccggcagctgtggtggggccatcagattccagcctacctggttgtagaggaccatgcgcagggagaagaggactgttgggtggttgggcggtcagaggctgaggccagagaggtagcagcggaactgacagggaggccaggggcagagctgaccctggagagggatcctgatgtcctagacacatggttttcttctgccctgttccccttttctgccctgggctggccccaagagaccccagaccttgctcgtttctaccccctgtcacttttggaaacgggcagcgaccttctgctgttctgggtgggccgcatggtcatgttggggacccagctcacagggcagctgcccttcagcaaggtgcttcttcatcccatggttcgggacaggcagggccggaagatgagcaagtccctggggaatgtgctggacccaagagacatcatcagtggggtggagatgcaggtgctgcaggaaaagctgagaagcggaaatttggaccctgcagagctggccattgtggctgcagcacagaaaaaggactttcctcacgggatccctgagtgtgggacagatgccctgagattcacactctgctcccatggagttcaggcgggcgacttgcacctgtcagtctctgaggtccagagctgccgacatttctgcaacaagatctggaatgctcttcgctttatcctcaatgctttaggggagaaatttgtgccacagcctgctgaggagctgtctccctcctccccgatggatgcctggatcctgagccgccttgccctggctgcccaggagtgtgagcggggcttcctcacccgagagctctcgctcgtcactcatgccctgcaccacttctggcttcacaacctctgtgacgtctacctggaggctgtgaagcccgtgctgtggcactcgccccgccccctggggccccctcaggtcctgttctcctgcgctgacctcggcctccgcctcctggccccactgatgcccttcctggctgaagagctctggcagaggctgccccccaggcctggttgcccccctgcccccagcatctcggttgccccctaccccagcgcctgcagcttggagcactggcgccagccagagctggagcggcgcttctcccgggtccaagaggtcgtgcaggtgctaagggctctccgagccacgtaccagctcaccaaagcccggccccgagtgctgctgcagagctcagagcctggggaccagggcctcttcgaggccttcttggagcccctgggcaccctgggctactgtggggctgtgggcctgttacccccaggcgcagcagctccctccggctgggcccaggctccactcagtgacacggctcaagtctacatggagctgcagggcctggtggacccgcagatccagctacctctgttagccgcccgaaggtacaagttgcagaagcagcttgatagcctcacagccaggaccccatcagaaggggaggcagggactcagaggcaacaaaagctttcttccctccagctggaattgtcaaaactggacaaggcagcctctcacctccagcagctgatggatgagcctccagccccagggagcccggagctctaa

SEQ ID NO: 441 - DNA, 654 bp, Homo Sapiens
atggcttcgaccggcttagaactgctgggcatgaccctggctgtgctgggctggctggggaccctggtgtcctgcgccctgcccctgtggaaggtgaccgccttcatcggcaacagcatcgtggtggcccaggtggtgtgggagggcctgtggatgtcctgcgtggtgcagagcacgggccagatgcagtgcaaggtgtacgactcactgctggctctgccgcaggacctgcaggccgcacgtgccctctgtgtcattgccctcctgctggccctgcttggcctcctggtggccatcacaggtgcccagtgtaccacgtgtgtggaggacgaaggtgccaaggcccgtatcgtgctcaccgcgggggtcatcctcctcctcgccggcatcctggtgctcatccctgtgtgctggacggcgcacgccatcatccaggacttctacaaccccctggtggctgaggccctcaagcgggagctgggggcctccctctacctgggctgggcggcggctgcactgcttatgctgggcggggggctcctctgctgcacgtgccccccgccccaggtcgagcggccccgcggacctcggctgggctactccatcccctcccgctcgggtgcatctggactggacaagagggactacgtgtga

SEQ ID NO: 442 - DNA, 1437 bp, Homo Sapiens
atggtccagaagaccagcatgtcccggggcccttacccaccctcccaggagatccccatggaggtcttcgaccccagcccgcagggcaaatacagcaagaggaaagggcgattcaaacggtcagatgggagcacgtcctcggataccacatccaacagctttgtccgccagggctcagcggagtcctacaccagccgtccatcagactctgatgtatctctggaggaggaccgggaagccttaaggaaggaagcagagcgccaggcattagcgcagctcgagaaggccaagaccaagccagtggcatttgctgtgcggacaaatgttggctacaatccgtctccaggggatgaggtgcctgtgcagggagtggccatcaccttcgagcccaaagacttcctgcacatcaaggagaaatacaataatgactggtggatcgggcggctggtgaaggagggctgtgaggttggcttcattcccagccccgtcaaactggacagccttcgcctgctgcaggaacagaagctgcgccagaaccgcctcggctccagcaaatcaggcgataactccagttccagtctgggagatgtggtgactggcacccgccgccccacaccccctgccagtgccaaacagaagcagaagtcgacagagcatgtgcccccctatgacgtggtgccttccatgaggcccatcatcctggtgggaccgtcgctcaagggctacgaggttacagacatgatgcagaaagctttatttgacttcttgaagcatcggtttgatggcaggatctccatcactcgtgtgacggcagatatttccctggctaagcgctcagttctcaacaaccccagcaaacacatcatcattgagcgctccaacacacgctccagcctggctgaggtgcagagtgaaatcgagcgaatcttcgagctggcccggacccttcagttggtcgctctggatgctgacaccatcaatcacccagcccagctgtccaagacctcgctggcccccatcattgtttacatcaagatcacctctcccaaggtacttcaaaggctcatcaagtcccgaggaaagtctcagtccaaacacctcaatgtccaaatagcggcctcggaaaagctggcacagtgcccccctgaaatgtttgacatcatcctggatgagaaccaattggaggatgcctgcgagcatctggcggagtacttggaagcctattggaaggccacacacccgcccagcagcacgccacccaatccgctgctgaaccgcaccatggctaccgcagccctggctgccagccctgcccctgtctccaacctccaggtacaggtgctcacctcgctcaggagaaacctcggcttctggggcgggctggagtcctcacagcggggcagtgtggtgccccaggagcaggaacatgccatgtag

SEQ ID NO: 443 - DNA, 2304 bp, Homo Sapiens
atgagctttgatccaaaccttctccacaacaatggacataatgggtaccctaatggtacttcagcagcactgcgtgaaactggggttattgaaaaactgttaacctcttacggatttattcagtgttcagaacgtcaagctagacttttcttccactgttcacagtataatggcaacctgcaagacttaaaagtaggagatgatgttgaatttgaagtatcatcggaccgacggactgggaaacccattgctgttaaactggtgaagataaaacaagaaatcctccctgaagaacgaatgaatggacaagaagtgttttatctgacttacacccctgaagatgtcgaagggaacgttcagctggaaactggagataaaataaactttgtaattgataacaataaacatactggtgctgtaagtgctcgcaacattatgctgttgaaaaagaaacaagcccgctgtcagggagtagtttgtgccatgaaggaggcatttggctttattgaaagaggtgatgttgtaaaagagatattctttcactatagtgaatttaagggtgacttagaaaccttacagcctggcgatgatgtggaattcacaatcaaggacagaaatggtaaagaagttgcaacagatgtcagactattgcctcaaggaacagtcatttttgaagatatcagcattgaacattttgaaggaactgtaaccaaagttatcccaaaagtacccagtaaaaaccagaatgacccattgccaggacgcatcaaagttgactttgtgatccctaaagaacttccctttggagacaaagatacgaaatccaaggtgaccctgctggaaggtgaccatgttaggtttaatatttcaacagaccgacgtgacaaattagagcgagcaaccaatatagaagttctgtcaaatacatttcagttcactaatgaagcccgagaaatgggtgtgattgctgccatgagagatggttttggtttcatcaagtgtgtggatcgtgatgttcgtatgttcttccacttcagtgaaattctggatgggaaccagctccatattgcagatgaagtagagtttactgtggttcctgatatgctctctgctcaaagaaatcatgctattaggattaaaaaacttcccaagggcacggtttcatttcattcccattcagatcaccgttttctgggcacggtagaaaaagaagccactttttccaatcctaaaaccactagcccaaataaaggcaaagagaaggaggctgaggatggcattattgcttatgatgactgtggggtgaaactgactattgcttttcaagccaaggatgtggaaggatctacttctcctcaaataggagataaggttgaatttagtattagtgacaaacagaggcctggacagcaggttgcaacttgtgtgcgacttttaggtcgtaattctaactccaagaggctcttgggttatgtggcaactctgaaggataattttggatttattgaaacagccaatcatgataaggaaatctttttccattacagtgagttctctggtgatgttgatagcctggaactgggggacatggtcgagtatagcttgtccaaaggcaaaggcaacaaagtcagtgcagaaaaagtgaacaaaacacactcagtgaatggcattactgaggaagctgatcccaccatttactctggcaaagtaattcgccccctgaggagtgttgatccaacacagactgagtaccaaggaatgattgagattgtggaggagggcgatatgaaaggtgaggtctatccatttggcatcgttgggatggccaacaaaggggattgcctgcagaaaggggagagcgtcaagttccaattgtgtgtcctgggccaaaatgcacaaactatggcttacaacatcacacccctgcgcagggccacagtggaatgtgtgaaagatcagtttggcttcattaactatgaagtaggagatagcaagaagctctttttccatgtgaaagaagttcaggatggcattgagctacaggcaggagatgaggtggagttctcagtgattcttaatcagcgcactggcaagtgcagcgcctgtaatgtttggcgagtctgtgagggccccaaggctgttgcagctcctcgacctgatcggttggtcaatcgcttgaagaatatcactctggatgatgccagtgctcctcgcctaatggttcttcgtcagccaaggggaccagataactcaatggggtttggtgcagaaagaaagatccgtcaagctggtgtcattgactaa

SEQ ID NO: 444 - DNA, 1224 bp, Homo Sapiens
atgtctggtggctccgcggattataacagagaacatggcggcccagagggaatggaccccgatggtgtcatcgagagcaactggaatgagattgttgataactttgatgatatgaatttaaaggagtctctccttcgtggcatctatgcttacggttttgagaagccttccgctattcagcagagagctattattccctgtattaaagggtatgatgtgattgctcaagctcagtcaggtactggcaagacagccacatttgctatttccatcctgcaacagttggagattgagttcaaggagacccaagcactagtattggcccccaccagagaactggctcaacagatccaaaaggtaattctggcacttggagactatatgggagccacttgtcatgcctgcattggtggaacaaatgttcgaaatgaaatgcaaaaactgcaggctgaagcaccacatattgttgttggtacacccgggagagtgtttgatatgttaaacagaagatacctttctccaaaatggatcaaaatgtttgttttggatgaagcagatgaaatgttgagccgtggttttaaggatcaaatctatgagattttccaaaaactaaacacaagtattcaggttgtgttgctttctgccacaatgccaactgatgtgttggaagtgaccaaaaaattcatgagagatccaattcgaattctggtgaaaaaggaagaattgacccttgaaggaatcaaacagttttatattaatgttgagagagaggaatggaagttggatacactttgtgacttgtacgagacactgaccattacacaggctgttatttttctcaatacgaggcgcaaggtggactggctgactgagaagatgcatgccagagacttcacagtttctgctctgcatggtgacatggaccagaaggagagagatgttatcatgagggaattccggtcagggtcaagtcgtgttctgatcactactgacttgttggctcgcgggattgatgtgcaacaagtgtctttggttataaattatgatctacctaccaatcgtgaaaactatattcacagaattggcagagggggtcgatttgggaggaaaggtgtggctataaactttgttactgaagaagacaagaggattcttcgtgacattgagactttctacaatactacagtggaggagatgcccatgaatgtggctgaccttatttaa

SEQ ID NO: 445 - DNA, 1080 bp, Homo Sapiens
atggctgaccaggaccctgcgggcatcagccccctccagcaaatggtggcctcaggcaccggggctgtggttacctctctcttcatgacacccctggacgtggtgaaggttcgcctgcagtctcagcggccctccatggccagcgagctgatgccttcctccagactgtggagcctctcctataccaaattgccctcctctctccaatccacagggaagtgcctcctgtattgcaatggtgtcctggagcctctgtacctgtgcccaaatggtgcccgctgtgccacctggtttcaagaccctacccgcttcactggcaccatggatgccttcgtgaagatcgtgaggcacgagggcaccaggaccctctggagcggcctccccgccaccctggtgatgactgtgccagctaccgccatctacttcactgcctatgaccaactgaaggccttcctgtgtggtcgagccctgacctctgacctctacgcacccatggtggctggcgcgctggcccgcctgggcaccgtgactgtgatcagccccctggagcttatgcggacaaagctgcaggctcagcatgtgtcgtaccgggagctgggtgcctgtgttcgaactgcagtggctcagggtggctggcgctcactgtggctgggctggggccccactgcccttcgagatgtgcccttctcagccctgtactggttcaactatgagctggtgaagagctggctcaatgggttcaggccgaaggaccagacttctgtgggcatgagctttgtggctggtggcatctcagggacggtggctgcagtgctgactctaccctttgacgtggtaaagacccaacgccaggtcgctctgggagcgatggaggctgtgagagtgaaccccctgcatgtggactccacctggctgctgctgcggaggatccgggccgagtcgggcaccaagggactctttgcaggcttccttcctcggatcatcaaggctgccccctcctgtgccatcatgatcagcacctatgagttcggcaaaagcttcttccagaggctgaaccaggaccggcttctgggcggctga

SEQ ID NO: 446 - DNA, 3879 bp, Homo Sapiens
atggcggatcccgcagcccccacgcccgcagctcccgctccagcccaggccccggctccagccccggaggcagtcccggccccagccgcagcccccgtcccggcgccggcgcccgcctcggactcggcctccgggccgtcctcggactccggcccagaagccggctcgcagcgcctgctgttttctcacgacctggtgtcgggccgttaccgtggctccgtgcacttcgggctggtgcgcctcatccacggcgaggactcggactcggagggcgaggaggagggccgcgggagctcggggtgctccgaggccgggggcgcgggccacgaggagggccgggccagccccctgcgccgcggctacgtgcgcgtccagtggtacccggagggcgtcaagcagcatgtgaaggagaccaagctgaaactagaggaccgttctgtggtgccccgagatgtggtccggcacatgcgatccaccgacagtcagtgtggcacggtgatcgacgtcaacatcgactgtgccgtcaagctcatcggcaccaactgcatcatctatcccgtcaacagcaaggacctgcagcacatctggcccttcatgtatggggactacattgcctatgactgctggctggggaaggtctacgacttgaagaaccagatcatcctgaagctatccaacggcgccaggtgctccatgaacacggaagatggcgccaagctctacgacgtctgcccgcacgtcagcgactcgggtctcttcttcgatgattcctatggcttctacccaggccaggtgctcattggccctgccaagatcttctccagcgtccagtggctgtcaggtgtcaagcccgtgctcagcaccaagagcaagttccgagtggtggtggaagaggtgcaggttgtagagttgaaagttacatggattaccaagagtttctgtccagggggcacggacagcgtcagccccccaccctctgtcatcacccaggaaaacctaggcagggtgaagcgtctcggatgctttgaccatgctcagcggcagcttggggagcgctgtctgtatgtcttcccagccaaggtagagccagccaagattgcctgggaatgtccagaaaaaaactgcgcccagggggagggctctatggccaagaaggtgaagcgcctgttgaagaagcaggttgtgcggatcatgtcatgctccccagacacccagtgttcccgggaccattccatggaagacccagacaagaagggggaatccaaaaccaagagcgaagcggagtctgccagccctgaggagacgcccgatggctctgccagtccagtggagatgcaggacgagggtgcagaggagccccacgaggcaggagagcagctgcccccattcctgctaaaagaaggcagagatgacaggctgcactcggcagagcaggacgcagatgatgaggctgctgatgacacggacgacaccagttcggtgacctcctctgccagctccaccacttcctcccagagcggcagcggcacgagtcgcaaaaagagcatccccttgtccatcaagaacttaaagcgcaaacacaagaggaagaagaataaaatcactcgagacttcaagccaggggacagggtggcagtggaggtggtgaccacgatgacctcagccgacgtgatgtggcaggatggctccgtggaatgcaacatccgctccaacgacctcttccctgtgcaccacctggacaacaacgagttctgccctggagacttcgtggtagataagcgagtccagagctgtccagaccctgctgtctacggtgtggtacagtctggggaccacatcggccgtacctgcatggtgaagtggttcaagctgaggccgagtggggacgacgtggagctgattggagaagaggaagatgtgagtgtttacgacattgctgaccaccctgactttaggttccgtacaactgacatcgtcatccgcatcggcaatactgaggatggggctcctcacaaggaggatgagccatcggtgggccaggtggcccgtgtggacgtcagcagcaaggtggaggtggtgtgggctgacaactcaaagaccatcatcctgccccagcacttgtacaacatagagtctgagattgaggagtcagactacgattcggtagaaggcagcaccagcggggcatcctcggatgaatgggaagatgatagtgacagctgggagacggacaatgggctggtggaggacgagcaccccaagatagaggagccccccatcccacccctggagcagccggtggcccctgaggacaagggagtggtgatcagtgaagaggcagccacagctgccgtccagggggctgtggccatggctgcccccatggccgggctgatggagaaggctggcaaggacgggccacccaagagcttccgggagttgaaagaggccatcaagatcctggagagcctcaagaacatgactgtggagcagctgctgacgggctcgcccacctctccgactgtggagcctgagaagccaactcgggagaagaagtttctggatgacatcaagaagctacaggaaaacctcaagaagaccctggacaatgtggccattgtagaggaggagaagatggaagcagtgcccgacgtagagcgcaaggaggacaagcccgaggggcagtcacctgtgaaggctgagtggcccagcgaaaccccggtgctgtgccagcagtgtggcggcaagcctggcgtcaccttcaccagcgccaagggcgaggtcttctccgtactggagtttgcaccctcaaatcattcttttaagaaaattgagttccagcctccagaagccaagaagttcttcagcacagtgcggaaggagatggcgctgctggctacctcactgcctgagggcatcatggtcaagacttttgaagatagaatggacctcttctcagctctcatcaagggccccactcgaaccccctacgaggatggcctctacttgtttgacatccagctccccaacatctacccagccgtgcccccccacttctgctacctctcccaatgcagtggccgcctgaaccccaacctgtatgacaatgggaaggtgtgtgtcagcctcctgggcacctggattggaaaggggacagagaggtggacaagcaagtccagccttctccaggtgctcatctccatccaaggtctgatcctggtaaatgaaccatactacaacgaagccggcttcgacagtgaccgaggcctgcaggaaggctatgaaaacagtcgctgttacaatgagatggcgctgatccgcgtggtgcagtccatgacccagctggtgcggcggccccccgaggtctttgagcaggagatcaggcaacactttagcactggtggctggcggctggtgaaccgtatcgagtcctggctggaaacccatgccctgctggagaaggcccaggcactgcccaacggggtgcccaaggccagcagctcgccagagcccccagctgtagccgagctgtcagactccggccaacaagaacctgaggatggagggccagccccaggagaggcctcccagggctcagactcagagggcggtgcccagggcctggcctcagctagcagggaccacacagaccagacttcggagaccgcaccagacgcatcggtgccacccagtgtgaaaccaaagaagcggagaaagagctaccggagcttcttacctgagaagagtggctaccctgacatcggcttccccctcttcccactttccaagggtttcatcaagagcatccggggtgtcctgacgcagttccgggctgccctgctagaggcaggcatgccggagtgcacagaggacaagtag

SEQ ID NO: 447 - DNA, 918 bp, Homo Sapiens
atggggatccagacgagccccgtcctgctggcctccctgggggtggggctggtcactctgctcggcctggctgtgggctcctacttggttcggaggtcccgccggcctcaggtcactctcctggaccccaatgaaaagtacctgctacgactgctagacaagacgactgtgagccacaacaccaagaggttccgctttgccctgcccaccgcccaccacactctggggctgcctgtgggcaaacatatctacctctccacccgaattgatggcagcctggtcatcaggccatacactcctgtcaccagtgatgaggatcaaggctatgtggatcttgtcatcaaggtctacctgaagggtgtgcaccccaaatttcctgagggagggaagatgtctcagtacctggatagcctgaaggttggggatgtggtggagtttcgggggccaagcgggttgctcacttacactggaaaagggcattttaacattcagcccaacaagaaatctccaccagaaccccgagtggcgaagaaactgggaatgattgccggcgggacaggaatcaccccaatgctacagctgatccgggccatcctgaaagtccctgaagatccaacccagtgctttctgctttttgccaaccagacagaaaaggatatcatcttgcgggaggacttagaggaactgcaggcccgctatcccaatcgctttaagctctggttcactctggatcatcccccaaaagattgggcctacagcaagggctttgtgactgccgacatgatccgggaacacctgcccgctccaggggatgatgtgctggtactgctttgtgggccacccccaatggtgcagctggcctgccatcccaacttggacaaactgggctactcacaaaagatgcgattcacctactga

SEQ ID NO: 448 - DNA, 1659 bp, Homo Sapiens
atgttggaccacaaggacttagaggccgaaatccaccccttgaaaaatgaagaaagaaaatcgcaggaaaatctgggaaatccatcaaaaaatgaggataacgtgaaaagcgcgcctccacagtcccggctctcccggtgccgagcggcggcgttttttctttcattgtttctctgcctttttgtggtgttcgtcgtctcattcgtcatcccgtgtccagaccggccggcgtcacagcgaatgtggaggatagactacagtgccgctgttatctatgactttctggctgtggatgatataaacggggacaggatccaagatgttctttttctttataaaaacaccaacagcagcaacaatttcagccgatcctgtgtggacgaaggcttttcctctccctgcacctttgcagctgctgtgtcgggggccaacggcagcacgctctgggagagacctgtggcccaagacgtggccctcgtggagtgtgctgtgccccagccaagaggcagtgaggcaccttctgcctgcatcctggtgggcagacccagttctttcattgcagtcaacttgttcacaggggaaaccctgtggaaccacagcagcagcttcagcgggaatgcgtccatcctgagccctctgctgcaggtgcctgatgtggacggcgatggggccccagacctgctggttctcacccaggagcgggaggaggttagtggccacctctactccggcagcaccgggcaccagattggcctcagaggcagccttggtgtggacggggaaagtggcttcctccttcacgtcaccaggacaggtgcccactacatcctctttccctgcgcaagctccctctgcggctgctctgtgaagggtctctacgagaaggtgaccgggagcggcggcccgttcaagagtgacccgcactgggagagcatgctcaatgccaccacccgcaggatgctttcccacagctctggagcagtgcgctacctgatgcatgtcccagggaacgccggtgcagatgtgcttcttgtgggctcagaggccttcgtgctgctggacgggcaggagctgacgcctcgctggacacccaaggcagcccatgtcctgagaaaacccatcttcggccgctacaaaccagacaccttggctgtagccgttgaaaacggaactggcaccgacagacagatcctgtttctggaccttggcactggagccgtcctgtgtagcctagccctcccgagcctccctgggggtccactgtccgccagcctgccgaccgcagaccaccgctcagccttcttcttctggggcctccacgagctggggagcaccagcgagacggagaccggggaggcccggcacagcctgtacatgttccaccccaccctgccgcgcgtgctgctggagctggccaatgtctctacccacattgtcgcctttgacgccgtcctgtttgagccaagccgccacgccgcctacatccttctgacaggcccggcagactcagaggcacccggcctggtctctgtgatcaagcacaaggtgcgggaccttgtcccaagcagcagggtggtccgcctgggtgagggtgggccagacagtgaccaagccatcagggaccggttctcccggctgcggtaccagagtgaggcgtag

SEQ ID NO: 449 - DNA, 510 bp, Homo Sapiens
atgttggctaccagggtatttagcctagttggcaagcgagcaatttccacctctgtgtgtgtacgagctcatgaaagtgttgtgaagagcgaagacttttcgctcccagcttatatggatcggcgtgaccaccccttgccggaggtggcccatgtcaagcacctgtctgccagccagaaggcactgaaggagaaggagaaggcctcctggagcagcctctccatggatgagaaagtcgagttgtatcgcattaagttcaaggagagctttgctgagatgaacaggggctcgaacgagtggaagacggttgtgggcggtgccatgttcttcatcggtttcaccgcgctcgttatcatgtggcagaagcactatgtgtacggccccctcccgcaaagctttgacaaagagtgggtggccaagcagaccaagaggatgctggacatgaaggtgaaccccatccagggcttagcctccaagtgggactacgaaaagaacgagtggaagaagtga

SEQ ID NO: 450 - DNA, 1515 bp, Homo Sapiens
atgtccctaatctgctccatctctaacgaagtgccggagcacccatgtgtatcccctgtctctaatcatgtttatgagcggcggctcatcgagaagtacattgcggagaatggtaccgaccccatcaacaaccagcctctctccgaggagcagctcatcgacatcaaagttgctcacccaatccggcccaagcctccctcagccaccagcatcccggccattctgaaagctttgcaggatgagtgggatgcagtcatgctgcacagcttcactctgcgccagcagctgcagacaacccgccaagagctgtcacacgctctgtaccagcacgatgccgcctgccgtgtcattgcccgtctcaccaaggaagtcactgctgcccgagaagctctggctaccctgaaaccacaggctggcctcattgtgccccaggctgtgccaagttcccaaccaagtgttgtgggtgcgggtgagccaatggatttgggtgagctggtgggaatgaccccagagattattcagaagcttcaagacaaagccactgtgctaaccacggagcgcaagaagagagggaagactgtgcctgaggagctggtgaagccagaagagctcagcaaataccggcaggtggcatcccacgtggggttgcacagtgccagcattcctgggatcctggccctggacctctgcccgtccgacaccaacaagatcctcactggtggggcggataaaaatgtcgttgtgtttgacaaaagttctgaacaaatcctggctaccctcaaaggccataccaagaaggtcaccagcgtggtgtttcacccttcccaggacctggtgttttctgcttcccccgatgccactatcaggatttggtcggtccccaatgcctcttgtgtacaggtggttcgggcccatgagagtgctgtgacaggcctcagccttcatgccactggcgactatctcctgagctcctccgatgatcagtactgggctttctctgacatccagacagggcgtgtgctcaccaaggtgacagatgagacctccggctgctctctcacctgtgcacagttccaccctgacggactcatctttggaacaggaaccatggactctcagatcaagatctgggacttgaaggaacgtactaatgtggccaacttccctggccactcgggccccatcactagcatcgccttctctgagaatggttactacctggctacagcggctgatgactcctctgtcaagctctgggatctgcgcaagcttaagaactttaagactttgcagctggataacaactttgaggtaaagtcactgatctttgaccagagtggtacctacctggctcttgggggcacggatgtccagatctacatctgcaaacaatggacggagattcttcactttacagagcatagcggcctgaccacaggggtggccttcgggcatcacgccaagttcatcgcttcaacaggcatggacagaagcctcaagttctacagcctgtag

SEQ ID NO: 451 - DNA, 1257 bp, Homo Sapiens
atgcgctccctcctgcttctcagcgccttctgcctcctggaggcggccctggccgccgaggtgaagaaacctgcagccgcagcagctcctggcactgcggagaagttgagccccaaggcggccacgcttgccgagcgcagcgccggcctggccttcagcttgtaccaggccatggccaaggaccaggcagtggagaacatcctggtgtcacccgtggtggtggcctcgtcgctagggctcgtgtcgctgggcggcaaggcgaccacggcgtcgcaggccaaggcagtgctgagcgccgagcagctgcgcgacgaggaggtgcacgccggcctgggcgagctgctgcgctcactcagcaactccacggcgcgcaacgtgacctggaagctgggcagccgactgtacggacccagctcagtgagcttcgctgatgacttcgtgcgcagcagcaagcagcactacaactgcgagcactccaagatcaacttccgcgacaagcgcagcgcgctgcagtccatcaacgagtgggccgcgcagaccaccgacggcaagctgcccgaggtcaccaaggacgtggagcgcacggacggcgccctgctagtcaacgccatgttcttcaagccacactgggatgagaaattccaccacaagatggtggacaaccgtggcttcatggtgactcggtcctataccgtgggtgtcatgatgatgcaccggacaggcctctacaactactacgacgacgagaaggaaaagctgcaaatcgtggagatgcccctggcccacaagctctccagcctcatcatcctcatgccccatcacgtggagcctctcgagcgccttgaaaagctgctaaccaaagagcagctgaagatctggatggggaagatgcagaagaaggctgttgccatctccttgcccaagggtgtggtggaggtgacccatgacctgcagaaacacctggctgggctgggcctgactgaggccattgacaagaacaaggccgacttgtcacgcatgtcaggcaagaaggacctgtacctggccagcgtgttccacgccaccgcctttgagttggacacagatggcaacccctttgaccaggacatctacgggcgcgaggagctgcgcagccccaagctgttctacgccgaccaccccttcatcttcctagtgcgggacacccaaagcggctccctgctattcattgggcgcctggtccggcctaagggtgacaagatgcgagacgagttatag

SEQ ID NO: 452 - DNA, 2922 bp, Homo Sapiens
atgattggtcgctgctttgtgctcagccaggacctggccatccgggatgagttggatggtggggaatggaagttctgtgagggacgcccccaaggccatgaacaatttgggttctgccagcagggcacagctgccgccttctcccctgatagccactacctcctctttggggccccaggaacctataattggaaggggttgctttttgtgaccaacattgatagctcagaccccgaccagctggtgtataaaactttggaccctgctgaccggctcccaggaccagccggagacttggccctcaatagctacttaggcttctctattgactcggggaaaggtctggtgcgtgcagaagagctgagctttgtggctggagccccccgcgccaaccacaagggtgctgtggtcatcctgcgcaaggacagcgccagtcgcctggtgcccgaggttatgctgtctggggagcgcctgacctccggctttggctactcactggctgtggctgacctcaacagtgatggctggccagacctgatagtgggtgccccctacttctttgagcgccaagaagagctggggggtgctgtgtatgtgtacttgaaccaggggggtcactgggctgggatctcccctctccggctctgcggctcccctgactccatgttcgggatcagcctggctgtcctgggggacctcaaccaagatggctttccagatattgcagtgggtgccccctttgatggtgatgggaaagtcttcacctaccatgggagcagcctgggggttgtcgccaaaccttcacaggtgctggagggcgaggctgtgggcatcaagagcttcggctactccctgtcaggcagcttggatatggatgggaaccaataccctgacctgctggtgggctccctggctgacaccgcagtgctcttcagggccagacccatcctccatgtctcccatgaggtctctattgctccacgaagcatcgacctggagcagcccaactgtgctggcggccactcggtctgtgtggacctaagggtctgtttcagctacattgcagtccccagcagctatagccctactgtggatgcggacacagaccggaggctccggggccaggttccccgtgtgacgttcctgagccgtaacctggaagaacccaagcaccaggcctcgggcaccgtgtggctgaagcaccagcatgaccgagtctgtggagacgccatgttccagctccaggaaaatgtcaaagacaagcttcgggccattgtagtgaccttgtcctacagtctccagacccctcggctccggcgacaggctcctggccaggggctgcctccagtggcccccatcctcaatgcccaccagcccagcacccagcgggcagagatccacttcctgaagcaaggctgtggtgaagacaagatctgccagagcaatctgcagctggtccgcgcccgcttctgtacccgggtcagcgacacggaattccaacctctgcccatggatgtggatggaacaacagccctgtttgcactgagtgggcagccagtcattggcctggagctgatggtcaccaacctgccatcggacccagcccagccccaggctgatggggatgatgcccatgaagcccagctcctggtcatgcttcctgactcactgcactactcaggggtccgggccctggaccctgcggagaagccactctgcctgtccaatgagaatgcctcccatgttgagtgtgagctggggaaccccatgaagagaggtgcccaggtcaccttctacctcatccttagcacctccgggatcagcattgagaccacggaactggaggtagagctgctgttggccacgatcagtgagcaggagctgcatccagtctctgcacgagcccgtgtcttcattgagctgccactgtccattgcaggaatggccattccccagcaactcttcttctctggtgtggtgaggggcgagagagccatgcagtctgagcgggatgtgggcagcaaggtcaagtatgaggtcacggtttccaaccaaggccagtcgctcagaaccctgggctctgccttcctcaacatcatgtggcctcatgagattgccaatgggaagtggttgctgtacccaatgcaggttgagctggagggcgggcaggggcctgggcagaaagggctttgctctcccaggcccaacatcctccacctggatgtggacagtagggataggaggcggcgggagctggagccacctgagcagcaggagcctggtgagcggcaggagcccagcatgtcctggtggccagtgtcctctgctgagaagaagaaaaacatcaccctggactgcgcccggggcacggccaactgtgtggtgttcagctgcccactctacagctttgaccgcgcggctgtgctgcatgtctggggccgtctctggaacagcacctttctggaggagtactcagctgtgaagtccctggaagtgattgtccgggccaacatcacagtgaagtcctccataaagaacttgatgctccgagatgcctccacagtgatcccagtgatggtatacttggaccccatggctgtggtggcagaaggagtgccctggtgggtcatcctcctggctgtactggctgggctgctggtgctagcactgctggtgctgctcctgtggaagatgggattcttcaaacgggcgaagcaccccgaggccaccgtgccccagtaccatgcggtgaagattcctcgggaagaccgacagcagttcaaggaggagaagacgggcaccatcctgaggaacaactggggcagcccccggcaggagggcccggatgcacaccccatcctggctgctgacgggcatcccgagctgggccccgatgggcatccagggccaggcaccgcctag

SEQ ID NO: 453 - DNA, 894 bp, Homo Sapiens
atggcttcgccgcagctctgccgcgcgctggtgtcggcgcaatgggtggcggaggcgctgcgggccccgcgcgctgggcagcctctgcagctgctggacgcctcctggtacctgccgaagctggggcgcgacgcgcgacgcgagttcgaggagcgccacatcccgggcgccgctttcttcgacatcgaccagtgcagcgaccgcacctcgccctacgaccacatgctgcccggggccgagcatttcgcggagtacgcaggccgcctgggcgtgggcgcggccacccacgtcgtgatctacgacgccagcgaccagggcctctactccgccccgcgcgtctggtggatgttccgcgccttcggccaccacgccgtgtcactgcttgatggcggcctccgccactggctgcgccagaacctcccgctcagctccggcaagagccaacctgctcccgccgagttccgcgctcagctcgaccccgccttcatcaagacctacgaggacatcaaggagaacctggaatcccggcgcttccaggtggtggactcccgagccactggcaggttccgcggcaccgagcccgagccccgagacggcattgaacctggccacatcccaggtaccgtgaacatccccttcacagacttcctgagccaggaggggctggagaagagccctgaggagatccgccatctgttccaggagaagaaagtggacctgtctaagccactggtggccacgtgtggctctggcgtcacagcctgccacgtggcactaggggcctacctctgcggcaagccagacgtgcccatctacgatggctcctgggtggagtggtacatgcgcgcccggcccgaggatgtcatctcagagggccgggggaagacccactga

SEQ ID NO: 454 - DNA, 1257 bp, Homo Sapiens
atggccacaagtgaacagagtatctgccaagcccgggcttccgtgatggtctacgatgacaccagtaagaaatgggtaccaatcaaacctggccagcagggattcagccggatcaacatctaccacaacactgccagcaacaccttcagagtcgttggagtcaagttgcaggatcagcaggttgtgatcaattattcaatcgtgaaagggctgaagtacaatcaggccacgccaaccttccaccagtggcgagatgcccgccaggtctacggcttaaactttgcaagtaaagaagaggcaaccacgttctccaatgcaatgctgtttgccctgaacatcatgaattcccaagaaggaggcccctccagccagcgtcaggtgcagaatggcccctctcctgatgagatggacatccagagaagacaagtgatggagcagcaccagcagcagcgtcaggaatctctagaaagaagaacctcggccacagggcccatcctcccaccaggacatccttcatctgcagccagcgcccccgtctcatgtagtgggcctccaccgccccccccacccccagtcccacctccacccactggggctaccccacctcccccacccccactgccagccggaggagcccaggggtccagccacgacgagagctccatgtcaggactggccgctgccatagctggggccaagctgagaagagtccaacggccagaagacgcatctggaggctccagtcccagtgggacctcaaagtccgatgccaaccgggcaagcagcgggggtggcggaggaggcctcatggaggaaatgaacaaactgctggccaagaggagaaaagcagcctcccagtcagacaagccagccgagaagaaggaagatgaaagccaaatggaagatcctagtacctccccctctccggggacccgagcagccagccagccacctaactcctcagaggctggccggaagccctgggagcggagcaactcggtggagaagcctgtgtcctcgattctgtccagaaccccgtctgtggcaaagagccccgaagctaagagcccccttcagtcgcagcctcactctaggatgaagcctgctgggagcgtgaatgacatggccctggatgccttcgacttggaccggatgaagcaggagatcctagaggaggtggtgagagagctccacaaggtgaaggaggagatcatcgacgccatcaggcaggagctgagtgggatcagcaccacgtaa

SEQ ID NO: 455 - DNA, 1314 bp, Homo Sapiens
atgagttggtccttgcacccccggaatttaattctctacttctatgctcttttatttctctcttcaacatgtgtagcatatgttgctaccagagacaactgctgcatcttagatgaaagattcggtagttattgtccaactacctgtggcattgcagatttcctgtctacttatcaaaccaaagtagacaaggatctacagtctttggaagacatcttacatcaagttgaaaacaaaacatcagaagtcaaacagctgataaaagcaatccaactcacttataatcctgatgaatcatcaaaaccaaatatgatagacgctgctactttgaagtccaggaaaatgttagaagaaattatgaaatatgaagcatcgattttaacacatgactcaagtattcgatatttgcaggaaatatataattcaaataatcaaaagattgttaacctgaaagagaaggtagcccagcttgaagcacagtgccaggaaccttgcaaagacacggtgcaaatccatgatatcactgggaaagattgtcaagacattgccaataagggagctaaacagagcgggctttactttattaaacctctgaaagctaaccagcaattcttagtctactgtgaaatcgatgggtctggaaatggatggactgtgtttcagaagagacttgatggcagtgtagatttcaagaaaaactggattcaatataaagaaggatttggacatctgtctcctactggcacaacagaattttggctgggaaatgagaagattcatttgataagcacacagtctgccatcccatatgcattaagagtggaactggaagactggaatggcagaaccagtactgcagactatgccatgttcaaggtgggacctgaagctgacaagtaccgcctaacatatgcctacttcgctggtggggatgctggagatgcctttgatggctttgattttggcgatgatcctagtgacaagtttttcacatcccataatggcatgcagttcagtacctgggacaatgacaatgataagtttgaaggcaactgtgctgaacaggatggatctggttggtggatgaacaagtgtcacgctggccatctcaatggagtttattaccaaggtggcacttactcaaaagcatctactcctaatggttatgataatggcattatttgggccacttggaaaacccggtggtattccatgaagaaaaccactatgaagataatcccattcaacagactcacaattggagaaggacagcaacaccacctggggggagccaaacaggctggagacgtttaa

SEQ ID NO: 456 - DNA, 1623 bp, Homo Sapiens
atggactcggtggcttttgaggatgtagatgtgaacttcacccaggaggagtgggctttgctagatccttcccagaagaatctctacagagatgtgatgtgggaaaccatgaggaatctggcctctatagggaaaaaatggaaggaccagaacattaaagatcactacaaacaccgagggagaaatctaagaagtcatatgttagaaagactctatcaaactaaggatggtagtcagcgtggaggaatttttagccagtttgcaaatcagaatctgagcaagaaaatccctggagtgaaactctgtgaaagcattgtatatggagaagtcagcatgggtcagtcatcccttaatagacacatcaaagatcacagtggacatgaaccaaaggaatatcaggaatatggagagaagccagatacacgtaaccagtgttggaaacccttcagttctcaccactcctttcgaacacatgagataattcacactggagagaaactctatgattgtaaggaatgtggaaaaaccttcttttctctcaaaagaattagaagacacatcatcacacacagtggatatacaccatataaatgtaaggtgtgtgggaaagcttttgattatcccagtagatttcgaacacatgaaagaagtcacactggagagaaaccctatgaatgtcaggaatgtggaaaagccttcacttgtatcacaagtgttcgaagacacatgataaagcacactggagatggaccttataaatgtaaggtatgtgggaaaccctttcattctctgagttcatttcaagtgcatgaaagaattcacactggagaaaaaccctttaaatgtaagcaatgtggtaaagccttcagttgttccccaaccttacgaatacatgaaagaacccatactggagagaaaccttatgaatgcaagcagtgtgggaaggccttcagttatctcccctcccttcgactacatgaaagaattcacactggtgagaaacccttcgtatgtaaacaatgtggtaaagcctttagatctgccagtacctttcaaatacatgaaaggactcacactggagaaaaaccttatgaatgtaaggaatgtggggaagcattcagttgtatcccaagtatgcgaagacacatgataaaacatactggagaaggaccttataaatgtaaggtatgtgggaaaccctttcattctctgagtccatttcgaatacatgaaagaactcacactggagagaaaccttatgtatgtaaacattgtggtaaagctttcgtttcttcaacatcaattcgaatacatgaaagaactcatactggagagaaaccctatgagtgtaagcaatgtgggaaagccttcagttatctcaactcctttcgaacacatgaaatgattcacactggtgagaaaccctttgaatgtaagcgatgtggtaaagcctttagatcttctagttcctttcgactacatgaaaggactcacactggacagaaaccctatcattgcaaggaatgtgggaaagcctattcttgccgtgccagctttcagagacacatgttaacacatgctgaagatggaccaccttataaatgcatgtgggaaagcctttaa

SEQ ID NO: 457 - DNA, 1074 bp, Homo Sapiens
atggcgccgcggagggtcaggtcgtttctgcgcgggctcccggcgctgctactgctgctgctcttcctcgggccctggcccgctgcgagccacggcggcaagtactcgcgggagaagaaccagcccaagccgtccccgaaacgcgagtccggagaggagttccgcatggagaagttgaaccagctgtgggagaaggcccagcgactgcatcttcctcccgtgaggctggccgagctccacgctgatctgaagatacaggagagggacgaactcgcctggaagaaactaaagcttgacggcttggacgaagatggggagaaggaagcgagactcatacgcaacctcaatgtcatcttggccaagtatggtctggacggaaagaaggacgctcggcaggtgaccagcaactccctcagtggcacccaggaagacgggctggatgaccccaggctggaaaagctgtggcacaaggcgaagacctctgggaaattctccggcgaagaactggacaagctctggcgggagttcctgcatcacaaagagaaagttcacgagtacaacgtcctgctggagaccctgagcaggaccgaagaaatccacgagaacgtcattagcccctcggacctgagcgacatcaagggcagcgtcctgcacagcaggcacacggagctgaaggagaagctgcgcagcatcaaccagggcctggaccgcctgcgcagggtcagccaccagggctacagcactgaggctgagttcgaggagcccagggtgattgacctgtgggacctggcgcagtccgccaacctcacggacaaggagctggaggcgttccgggaggagctcaagcacttcgaagccaaaatcgagaagcacaaccactaccagaagcagctggagattgcgcacgagaagctgaggcacgcagagagcgtgggcgacggcgagcgtgtgagccgcagccgcgagaagcacgccctgctggaggggcggaccaaggagctgggctacacggtgaagaagcatctgcaggacctgtccggcaggatctccagagctcggcacaacgaactctga

SEQ ID NO: 458 - DNA, 1944 bp, Homo Sapiens
atggctgaggaggaggcgcctaagaagtcccgggccgccggcggtggcgcgagctgggaactttgtgccggggcgctctcggcccggctggcggaggagggcagcggggacgccggtggccgccgccgcccgccagttgacccccggcgattggcgcgccagctgctgctgctgctttggctgctggaggctccgctgctgctgggggtccgggcccaggcggcgggccaggggccaggccaggggcccgggccggggcagcaaccgccgccgccgcctcagcagcaacagagcgggcagcagtacaacggcgagcggggcatctccgtcccggaccacggctattgccagcccatctccatcccgctgtgcacggacatcgcgtacaaccagaccatcatgcccaacctgctgggccacacgaaccaggaggacgcgggcctggaggtgcaccagttctaccctctagtgaaagtgcagtgttccgctgagctcaagttcttcctgtgctccatgtacgcgcccgtgtgcaccgtgctagagcaggcgctgccgccctgccgctccctgtgcgagcgcgcgcgccagggctgcgaggcgctcatgaacaagttcggcttccagtggccagacacgctcaagtgtgagaagttcccggtgcacggcgccggcgagctgtgcgtgggccagaacacgtccgacaagggcaccccgacgccctcgctgcttccagagttctggaccagcaaccctcagcacggcggcggagggcaccgtggcggcttcccggggggcgccggcgcgtcggagcgaggcaagttctcctgcccgcgcgccctcaaggtgccctcctacctcaactaccacttcctgggggagaaggactgcggcgcaccttgtgagccgaccaaggtgtatgggctcatgtacttcgggcccgaggagctgcgcttctcgcgcacctggattggcatttggtcagtgctgtgctgcgcctccacgctcttcacggtgcttacgtacctggtggacatgcggcgcttcagctacccggagcggcccatcatcttcttgtccggctgttacacggccgtggccgtggcctacatcgccggcttcctcctggaagaccgagtggtgtgtaatgacaagttcgccgaggacggggcacgcactgtggcgcagggcaccaagaaggagggctgcaccatcctcttcatgatgctctacttcttcagcatggccagctccatctggtgggtgatcctgtcgctcacctggttcctggcggctggcatgaagtggggccacgaggccatcgaagccaactcacagtattttcacctggccgcctgggctgtgccggccatcaagaccatcaccatcctggcgctgggccaggtggacggcgatgtgctgagcggagtgtgcttcgtggggcttaacaacgtggacgcgctgcgtggcttcgtgctggcgcccctcttcgtgtacctgtttatcggcacgtcctttctgctggccggctttgtgtcgctcttccgcatccgcaccatcatgaagcacgatggcaccaagaccgagaagctggagaagctcatggtgcgcattggcgtcttcagcgtgctgtacactgtgccagccaccatcgtcatcgcctgctacttctacgagcaggccttccgggaccagtgggaacgcagctgggtggcccagagctgcaagagctacgctatcccctgccctcacctccaggcgggcggaggcgccccgccgcacccgcccatgagcccggacttcacggtcttcatgattaagtaccttatgacgctgatcgtgggcatcacgtcgggcttctggatctggtccggcaagaccctcaactcctggaggaagttctacacgaggctcaccaacagcaaacaaggggagactacagtctga

SEQ ID NO: 459 - DNA, 1008 bp, Homo Sapiens
atggcggcgggggcggctgaggcagctgtagcggccgtggaggaggtcggctcagccgggcagtttgaggagctgctgcgcctcaaagccaagtccctccttgtggtccatttctgggcaccatgggctccacagtgtgcacagatgaacgaagttatggcagagttagctaaagaactccctcaagtttcatttgtgaagttggaagctgaaggtgttcctgaagtatctgaaaaatatgaaattagctctgttcccacttttctgtttttcaagaattctcagaaaatcgaccgattagatggtgcacatgccccagagttgaccaaaaaagttcagcgacatgcatctagtggctccttcctacccagcgctaatgaacatcttaaagaagatctcaaccttcgcttgaagaaattgactcatgctgccccctgcatgctgtttatgaaaggaactcctcaagaaccacgctgtggtttcagcaagcagatggtggaaattcttcacaaacataatattcagtttagcagttttgatatcttctcagatgaagaggttcgacagggactcaaagcctattccagttggcctacctatcctcagctctatgtttctggagagctcataggaggacttgatataattaaggagctagaagcatctgaagaactagatacaatttgtcccaaagctcccaaattagaggaaaggctcaaagtgctgacaaataaagcttctgtgatgctctttatgaaaggaaacaaacaggaagcaaaatgtggattcagcaaacaaattctggaaatactaaatagtactggtgttgaatatgaaacattcgatatattggaggatgaagaagttcggcaaggattaaaagcttactcaaattggccaacataccctcagctgtatgtgaaaggggagctggtgggaggattggatattgtgaaggaactgaaagaaaatggtgaattgctgcctatactgagaggagaaaattaa

SEQ ID NO: 460 - DNA, 834 bp, Homo Sapiens
atggcctcggcagagctggactacaccatcgagatcccggatcagccctgctggagccagaagaacagccccagcccaggtgggaaggaggcagaaactcggcagcctgtggtgattctcttgggctggggtggctgcaaggacaagaaccttgccaagtacagtgccatctaccacaaaaggggctgcatcgtaatccgatacacagccccgtggcacatggtcttcttctccgagtcactgggtatcccttcacttcgtgttttggcccagaagctgctcgagctgctctttgattatgagattgagaaggagcccctgctcttccatgtcttcagcaacggtggcgtcatgctgtaccgctacgtgctggagctcctgcagacccgtcgcttctgccgcctgcgtgtggtgggcaccatctttgacagcgctcctggtgacagcaacctggtaggggctctgcgggccctggcagccatcctggagcgccgggccgccatgctgcgcctgttgctgctggtggcctttgccctggtggtcgtcctgttccacgtcctgcttgctcccatcacagccctcttccacacccacttctatgacaggctacaggacgcgggctctcgctggcccgagctctacctctactcgagggctgacgaagtagtcctggccagagacatagaacgcatggtggaggcacgcctggcacgccgggtcctggcgcgttctgtggatttcgtgtcatctgcacacgtcagccacctccgtgactaccctacttactacacaagcctctgtgtcgacttcatgcgcaactgcgtccgctgctga

SEQ ID NO: 461 - DNA, 798 bp, Homo Sapiens
atggcgactctgctgcgccctgtcctccgtcggctctgcgggctcccgggcctacagcggcctgcggcagaaatgcccctccgggctaggagcgacggcgccggcccgctatactcgcaccacctccccacctccccgctgcagaaagcgctgttggccgccggctccgcggcgatggcgctctataacccctaccgccacgacatggtcgcagttctaggggagaccacaggacaccgcaccctgaaggtcctcagggaccagatgaggagggatccagagggtgcccagatcctgcaggagcgtccccggatttcgacatccaccctcgacctgggcaagctccagagcctgccggaaggctccctcggtcgcgagtatctccgtttcctggatgtgaacagggtctccccagacacccgagcacccacccgcttcgtggatgatgaggagctagcgtatgtgattcagcggtaccgggaggtgcacgacatgcttcacaccctgctggggatgcccaccaacatcctgggggagatcgtggtgaaatggtttgaggctgtccagactggcctgcccatgtgcatcctgggtgcattctttggaccgatccgacttggcgctcagagcctgcaagtgctggtctcggagttgatcccatgggccgttcagaacgggcgcagagccccatgtgtcctcaacctgtactatgagcggcgctgggagcagtccctgagggctctgcgggaggagctgggcattacagcaccacccatgcacgtccagggcttggcctga

SEQ ID NO: 462 - DNA, 1221 bp, Homo Sapiens
atggcggaccctaaatacgccgaccttcccggcattgccaggaatgagccagatgtttatgaaactagcgacctacctgaggatgatcaagcggagttcgatgcgtttgcacaagagctggaggagctgacaagcacaagtgtggaacacatcattgtcaatcctaatgctgcctatgacaagttcaaggacaagagagtggggacaaagggacttgatttctcagatcgtattggaaaaaccaagaggacaggatatgaatctggagaatatgagatgcttggagagggtctgggagtgaaggagacaccccagcaaaagtaccagcgcctactgcatgaggtccaagagctgacaactgaagttgaaaaaatcaagacgacagtgaaggagtcagccacagaggagaagctgacccctgtgttgctggctaaacagctggcagccctgaagcagcagctggttgcttcccacctggagaagctgctgggaccagatgctgcaatcaaccttaccgaccccgatggcgccctggctaagcgcctactactgcagctggaagcaacaaagaacagcaaagggggatcagggggaaaaaccactgggacccccccagatagcagccttgtcacttatgaactacattctcggcctgagcaggacaagttctctcaagctgccaaagtcgcagaacttgaaaagcgcctgacagagctggagacagctgtacgttgtgatcaggatgctcagaatcccctttctgcaggtctacagggagcctgtctcatggagactgtagagctgttgcaagcaaaggtgagcgccctagaccttgcagttttggatcaagtggaggctcggctacagagtgtcctgggaaaggtgaacgagattgccaagcataaagcctctgtagaagatgcagatacacaaagcaaggtgcaccagctatatgaaactatacagcgctggagccccattgcctccaccctccctgagctggtgcagagacttgtcaccatcaagcagctgcacgagcaagccatgcagtttggtcagctcctgacacacttggataccacccagcagatgattgctaattccttgaaggacaataccaccctcttgacccaggtgcagacaaccatgcgtgaaaacctggccacagttgaggggaactttgccagcattgatgaacggatgaagaagctgggaaagtga

SEQ ID NO: 463 - DNA, 1314 bp, Homo Sapiens
atggcagcggccactctgaggacgccaactcagggcactgtgacctttgaagatgtggccgtacacttctcctgggaggaatggggtctccttgatgaggctcaaagatgcctgtaccgtgatgtgatgctggagaacttggctcttttaacctctctagatgttcatcatcagaagcagcaccttggagaaaaacatttcagaagcaatgtgggcagagccttgtttgtgaagacctgcacattccatgtgtcaggggagccttccacctgcagagaagttgggaaggacttcctggccaagttgggatttctccatcaacaggctgctcacactggggagcaatcaaatagcaaaagcgacggtggggccatcagtcacagaggaaaaactcattacaactgtggagaacacacaaaagcattcagcggtaaacacacacttgttcagcagcagagaaccctcactacagaaagatgttacatatgcagtgaatgtgggaaatcctttagcaaaagctacagtctcaatgaccattggagacttcacactggagaaaagccttatgaatgtcgagagtgtgggaagtcctttaggcaaagctctagtctcattcagcaccggagagttcacactgcagtacgacctcatgaatgtgatgaatgtggaaaattatttagcaacaagtctaacctcattaaacatcggagagttcacactggggaaaggccatatgagtgcagtgaatgtgggaaatcctttagccaaaggtctgcactccttcaacatcggggagttcacactggggagaggccttatgagtgcagtgaatgtgggaagttttttacatatcattccagtctcataaaacaccagaaagttcacagtggatccaggccttatgagtgcagcgaatgtgggaagtcatttagccaaaactctagcctcattgaacaccatagggttcacactggagaaaggccttataagtgcagcgaatgtgggaaatcctttagccaaaggtctgcactccttcaacatcggggagttcacactggggagaggccttatgagtgcagtgaatgtgggaagttctttccctacagctccagtctccgaaaacaccagagagttcacactggatcaagaccctatgagtgcagtgaatgtgggaaatcctttactcaaaattccggcctcattaagcacaggagggttcacactggggagaagccttatgagtgcacggaatgtgggaaatcctttagccataactccagccttattaaacatcagagaattcatagtcgataa

SEQ ID NO: 464 - DNA, 13941 bp, Homo Sapiens
atgtcggagcccgggggcggcggcggcgaggacggctcggccggattggaagtgtcggccgtgcagaatgtggcggacgtgtcggtgctgcagaagcacctgcgcaagctggtgccgctgctgctggaggacggcggcgaggcgccggccgcgctggaggcggcgctggaggagaagagcgccctggagcagatgcgcaagttcctttcggacccgcaggtccacacggtgctggtggagcgctccacgctcaaagaggacgtcggtgatgaaggagaagaagaaaaagaattcatttcctataacatcaacatagacattcattatggggttaaatccaatagcttggcattcattaaacgtactcccgtgattgatgcagataaacccgtgtcttctcagctccgggtccttacactcagtgaagactcgccctacgaaactttgcattctttcattagcaatgcagtggctcctttttttaagtcctacattagagagtctggcaaggcagacagggatggtgataaaatggctccttcagttgaaaagaagattgcagaactcgaaatgggactccttcacttgcagcaaaatattgaaattccggagatcagcctgccgattcatccaatgatcacaaatgttgcaaaacagtgttatgagcgtggagaaaagccaaaagttacagactttggtgataaggttgaagacccaacatttcttaatcagttacaatctggagttaaccgctggatccgagaaattcaaaaagtgaccaaactggatcgagatcctgcatcaggaactgccttacaggaaattagtttttggctaaacttggaacgtgcgttataccgcatccaggagaaacgggagagcccggaagttctcctgactctggatatcttgaaacatggcaagcgcttccatgccaccgtcagttttgacactgacacaggtctaaaacaggctttggaaactgtgaatgactacaatcctctgatgaaagatttccctctgaatgatttgctgtctgccacggagctggacaaaataagacaggcgcttgttgccattttcacacatttgagaaagatccgaaacacaaaatatcctattcagagggcactgcgtttggtggaggcaatttcaagagacttgagttctcaattactcaaagtattgggcactaggaaattgatgcatgttgcttatgaagaatttgaaaaagttatggtagcatgctttgaagtttttcagacttgggatgatgagtatgagaaacttcaggtattgttgagagacatcgtcaaaagaaaaagggaagaaaatctgaagatggtgtggcgtatcaaccctgcccacaggaagctgcaggcccgccttgaccagatgagaaaatttagacgccagcatgaacagctaagagctgttatcgtcagggtcctgaggccacaggtcacggcagttgcacaacagaatcaaggagaggtccctgaaccccaagatatgaaagtggctgaggttctctttgatgctgcagatgcaaatgccattgaggaagtaaaccttgcttatgagaacgtcaaggaagtggatggactggatgtttccaaagagggcacggaagcctgggaggctgctatgaagaggtacgatgagaggatcgacagagtggagacccggatcaccgctcgccttcgggatcagcttggcacagccaagaatgccaacgagatgtttaggattttctccaggtttaatgcactgtttgtcaggcctcacatccgtggggccattcgcgaataccagacccagctgatccagcgcgtgaaagatgacattgagtctcttcacgacaagttcaaggtccagtacccacagagtcaggcttgtaagatgagtcacgttcgtgacttgccccctgtgtcagggtctatcatctgggctaaacagatcgacaggcagctgacggcctacatgaagcgggtggaagatgtccttggcaagggctgggagaatcacgtggaggggcagaagctgaagcaggatggagacagcttccgcatgaagctcaacacgcaggagatctttgatgactgggcaaggaaggtgcagcagcgcaacctcggtgtctcggggcgcattttcaccatcgaaagtactcgggttcggggccgaactggaaatgtgcttaagctgaaagttaactttcttcctgagattatcacactatccaaagaagtccggaacctcaaatggcttggtttccgcgtcccactggcgattgtgaacaaagcccatcaagcaaaccagctttacccgtttgccatctcactgatcgagagcgttcgtacctatgaacggacctgcgagaaggtggaggagcggaacaccatttcccttttggtggctggcttgaaaaaggaagtgcaggccctgatcgcagaaggcattgcgttggtgtgggagtcctacaaacttgacccatatgtacagcgcttagcagagactgtcttcaacttccaagaaaaggtggatgatctgctgatcattgaagaaaaaatagacctagaagtccgttccttggaaacttgtatgtatgaccataagacattctcggaaatcttgaacagagtccagaaagcagtggatgacttaaatctgcactcctattccaatttgcccatctgggtcaacaagcttgacatggagattgaaagaatattgggcgtccgtctgcaagctggcctgagagcttggacgcaggttcttcttggacaagctgaagataaagcagaagttgacatggacacagatgctccacaagttagtcacaagcctggtggagagccaaagatcaaaaatgtcgttcatgagctaagaataaccaatcaggtaatctacttgaatccaccaattgaagagtgcagatacaagctgtatcaggaaatgtttgcctggaagatggttgtactgtctctccccaggatccagagtcagaggtaccaggtgggtgtacattacgaattgactgaggaagagaaattctatcggaatgctttaacacggatgcctgatggccctgttgccctggaagagtcgtattctgctgtcatgggcattgtatctgaagttgaacagtatgtcaaggtttggcttcagtatcagtgtttatgggatatgcaagctgaaaacatctataacagacttggagaagatctcaacaaatggcaggctctcctggtccaaataaggaaggccagaggaacctttgacaatgcagaaaccaagaaagagtttggaccagtagttatagattatggcaaggtacaatctaaggtgaacttgaaatatgactcttggcataaggaggttcttagcaaatttgggcagatgctaggatcaaacatgacggaattccattcccagatctcaaagtcccgccaagagttggagcagcactcagtagacacggccagcacctccgatgcagtgaccttcatcacctatgtgcagtctttgaaacggaagatcaagcagtttgagaagcaagttgagctctaccgcaatggccagcgcttactggaaaagcaaaggttccagttcccaccttcctggctttatattgacaacatcgagggagagtggggagccttcaatgacatcatgcggcgaaaggactctgccattcagcagcaggtggcaaacctgcaaatgaagattgtccaggaggatcgggccgtggaaagccgcaccaccgacctgctgactgactgggagaagaccaagcctgtcacgggcaaccttcgcccagaagaggcacttcaggctctcaccatatatgaggggaagtttggtaggctgaaggacgacagagagaagtgtgcaaaggccaaggaggcgctggaattgacagatactgggcttctcagtggcagtgaagagcgcgtgcaggtggccttagaagaattacaggacctcaaaggcgtttggtcagaactttctaaggtttgggagcaaatcgatcagatgaaggagcaaccctgggtttcagtacagcctcgaaagcttcgacaaaatttggatgccctcctgaaccagctgaaaagcttccctgcccggttgcgacagtatgcgtcctatgagtttgttcagaggcttctgaaaggttacatgaagataaatatgctggtgattgaactgaaatccgaagcacttaaagaccgccattggaaacagctcatgaaaaggcttcacgttaattgggttgtttctgagctaacccttggccaaatctgggatgttgacttgcagaaaaatgaagcgattgtcaaggatgtactgcttgtggcacaaggggagatggctttggaagaatttttgaagcagataagagaagtgtggaatacttatgaactagacttggttaattatcagaacaagtgccgcttgatccgtggctgggatgacctcttcaacaaggtcaaagaacacatcaacagcgtctcggccatgaagctctctccgtattacaaggtttttgaagaggatgctctcagctgggaagataagctgaacaggatcatggctctctttgatgtgtggattgatgtgcagaggcggtgggtctacctggaaggtatcttcacaggcagtgcagatatcaagcacctgctgccagtggaaacccagcggtttcagagcatcagcactgagtttttggctctaatgaaaaaagtgtccaagtctccccttgttatggatgttctgaacatccagggagtacagaggtctctggaaagattggcagacctgctaggaaagatccagaaagcattgggagaatatctggaaagagagcggtcatctttccccaggttctattttgtgggtgatgaagatttgcttgaaatcattggaaacagcaagaatgtcgctaaattacagaaacacttcaagaagatgtttgctggagtttcgagcatcatcctgaacgaggataactctgttgttttgggtatttcatctcgggaaggagaggaggttatgtttaaaactcctgtgtcaattactgaacatcccaaaatcaatgagtggctcacattggtagaaaaggagatgagagtcaccctggccaaactgcttgctgagtctgttacggaagttgagatttttggtaaagcaacttcaattgacccaaatacctacatcacttggattgataaataccaggcccagcttgtggttttgtcagcccagatagcctggtctgagaacgtggagaccgcactgagcagcatgggcggaggtggagatgccgcgcccttgcactctgtgctgagcaatgtggaggtcaccctcaatgtgttagcagactctgtcctcatggagcagcccccactccgaaggcggaagctagaacacttgattacagagttggttcaccagagagatgttacaaggtccttgatcaaaagcaagattgacaacgccaaatcttttgaatggctcagccagatgcgattttactttgaccctaagcaaactgatgtgttacagcagttgtcaattcaaatggcaaatgccaaatttaactatggctttgagtacctgggtgttcaggacaaactggtccagacccccctcactgaccgctgctatttgacaatgacacaagccttggaggccaggctggggggttccccatttggacctgctggaactgggaaaacagagtctgtcaaagctcttggccatcagcttggacggtttgttttagttttcaactgtgatgaaacctttgatttccaggcaatgggccggatctttgtgggcctttgccaggtgggtgcctggggctgctttgacgagttcaaccgcctggaggagcggatgctctcggctgtgtcccagcaggtgcagtgcatacaggaagcactgcgtgaacattccaaccccaactacgacaagacctctgcccccattacttgtgagctgctgaacaaacaagtcaaggtgagcccggacatggccatcttcatcaccatgaaccctggctacgcgggccggtctaaccttcctgacaacttgaagaagctgttccggagcttggccatgaccaagcccgaccggcagttaatcgcccaggtcatgctgtactcacagggtttccgcactgctgaagtgcttgccaacaaaatcgtcccgttttttaaactatgcgatgagcagctctcttcccaaagccattatgacttcggtcttcgggctttgaagagtgtgctggtgagtgcaggcaatgtgaagagagagagaatccagaagataaagagggagaaagaggaacgaggggaagcagttgatgaaggagaaattgctgaaaatctccctgaacaagagattctgatacagagcgtctgtgagacgatggtgccaaagctggtggcagaggacatcccgctgctcttcagcctcctgtcggacgtgttccctggagtccagtatcacaggggtgagatgactgcccttcgagaggagctgaagaaagtgtgtcaggagatgtatttgacatatggagatggagaagaagttggtggaatgtgggttgaaaaggttctccagctctatcagatcacccagatcaatcatggcctgatgatggtggggccctcgggaagtgggaagagcatggcctggcgtgtcctgctgaaggcattggagagactcgagggtgtggaaggtgtggcccatatcatcgaccccaaggccatcagcaaagaccacctctacggaaccctggaccccaacaccagggaatggacagatgggctcttcacacacgtgctgagaaagatcatcgacagcgtgagaggcgagctgcagaagcgccagtggatcgtcttcgatggcgatgtggatccagagtgggttgagaacttgaactcagtgctggatgacaataagctcctaactttgcccaatggagagcgcctcagtcttccacccaatgtgagaataatgtttgaggtacaggacttgaaatacgcgaccttggccacagtgtcgcgctgcggcatggtctggttcagtgaggatgtgctgagcaccgacatgatcttcaacaacttcctggccaggctgcgcagcatcccgctggatgaaggggaggatgaggcacagcggcggcgtaagggcaaagaggatgagggggaggaggccgcttcccccatgctgcagatccaaagagatgcagctacgatcatgcaaccgtacttcacgtccaacggcctggtcaccaaggcgctagagcacgccttccagctggagcacatcatggacctaacacgcctgcgctgcctgggctcgctcttctccatgctgcaccaggcctgccgcaacgtggcgcagtataacgccaaccatcccgacttccccatgcagatcgagcagctggagcgctacattcagcgatatctggtttatgccatactctggtccctgtctggagacagccggctaaaaatgagagcagagctgggtgaatacatcagaagaatcacgaccgtgcctctgcccactgcgcccaacatacccattatcgattatgaggtgtccatcagcggagaatggtctccgtggcaggccaaggtgcctcagattgaagtggagacgcacaaggtggcagcccctgatgtcgtcgtgccaacgctggacacagtccgccacgaagccctcttgtacacttggctggccgaacacaagcccctggtcttgtgtggccctcctgggtctggcaagaccatgacactcttcagcgccctccgggccttgcctgacatggaggtggtgggtctcaacttctccagtgctactactccagagctgcttctgaagacttttgatcactactgcgagtacaggcgcacacctaatggggtggttttggctcctgttcaacttggaaagtggctggtgttgttctgtgatgaaatcaacttgccagatatggataaatatgggacccagagggtcatatccttcatcagacagatggtggagcacggaggcttttaccgtacctcagatcaaacatgggtgaagctggagagaatccagtttgttggggcttgtaatccccccacagaccctggaagaaagcccctctcacacaggttcctgcgccacgtgcctgtcgtgtatgtggattacccgggccccgcctccctcacacagatctacggcaccttcaaccgcgccatgctgaggctcattccatccctgcggacgtatgcagagccgctcactgctgccatggtggagttctacaccatgtctcaggagagattcacccaggatacacaacctcactatatctattcaccccgtgaaatgactaggtgggtgagaggcatctttgaagcgctgagacctctggagaccctgcctgttgaaggcctcattcggatttgggcacatgaagctctgcgtctcttccaagatagactcgtagaggatgaggagaggcgttggactgatgagaacatcgacacggttgctctgaagcacttccctaacatcgacagagagaaggcaatgagccgacccatcttgtacagcaactggctgtcaaaggattacatcccagtagaccaagaagagttaagagattatgtcaaagctaggctgaaggtcttttatgaagaagaacttgatgttccgctggtgctgtttaatgaagtcctagaccacgtgctgaggattgacagaatattccgtcaacctcaaggccacttgcttctgattggtgttagtggagcaggaaaaactaccctgtctcgtttcgtcgcctggatgaacggtttgagtgtgtaccagattaaggtccataggaagtacacaggggaagactttgatgaagatctacggacagtgttgagacgttctggctgtaaaaatgaaaagatagcatttataatggatgaatctaatgtgttagattctggattcctggagcgaatgaatacccttctggccaatggagaggtgcctggtctctttgaaggagacgagtatgccaccttgatgacgcagtgcaaagagggggcacagaaggaaggcctgatgctggactcgcacgaggagctctacaagtggttcactagccaggttatccgcaacctccacgtcgtgttcaccatgaacccgtcctcggagggactcaaggaccgggcagctacatcaccagcacttttcaacaggtgtgtgttgaattggtttggagactggtccaccgaagcactgtatcaggttggcaaagaattcacaagtaagatggatctggagaagccaaattacatcgtgcctgattacatgccagttgtgtatgataagctgccgcagccaccatcccatcgggaagccattgtgaacagctgtgtgtttgttcatcagactcttcaccaggcgaatgctcggctagcaaagcgaggcggcagaacgatggccatcacccctcgccactacctggacttcatcaatcactatgccaacctgttccacgagaagcggagcgagctggaggagcagcagatgcacttgaacgtggggctcaggaagatcaaagagacagtcgaccaggtagaagaactgcgtcgtgacttgaggataaagagccaagagctggaggtgaagaatgcagcagccaatgacaagctgaaaaagatggtgaaagaccagcaggaggctgaaaagaagaaggttatgagccaagaaatccaggaacagctgcataagcagcaggaggtaattgcagacaaacagatgagtgtcaaagaagatcttgataaggtggaacctgccgtcattgaggcccagaatgctgtgaagtcgatcaagaagcagcacctggtggaggtgaggtccatggccaaccctcctgctgctgtgaagctggcgctggagtccatctgcctgctgctgggggaaagcaccacagactggaagcagatccgctccatcatcatgcgggagaacttcatccccaccatcgtcaacttctctgcagaggagatcagtgacgccataagggagaagatgaagaaaaattacatgtccaatccaagttacaattatgaaattgtgaatcgggcttccctggcttgcggccctatggtgaaatgggcaattgcacagcttaactatgcagacatgttaaagagagtggagcccctacgcaatgagctgcagaagctggaagatgacgccaaggacaaccagcagaaggccaacgaggtggagcagatgatccgagacctggaagccagcatcgcccgctacaaggaggaatacgccgtcctgatctcagaggcccaggccatcaaggcagacctggcagctgtcgaggcaaaagtaaaccggagcactgctcttctgaagagcttgtctgctgaacgtgaacgatgggaaaaaacaagtgaaactttcaaaaaccagatgtccaccattgctggggactgtctcttgtcagctgcgttcattgcctacgcgggttactttgaccagcagatgcgtcagaacttgttcactacctggtcccatcacctacagcaagccaacatccagttccgtacagatattgccaggacggaatacctttccaatgctgatgagcgtcttcgctggcaggccagctccttgcctgctgatgacctttgcacagaaaatgccatcatgctgaaacgattcaataggtatccgctgatcattgacccctctggacaggccacagaattcattatgaatgaatataaggatcgtaagatcacacggaccagcttcctggatgacgccttcagaaagaacttagagagtgcactgagattcggtaacccccttctggtccaggatgtggaaagctacgatccagttttgaacccggtgctgaaccgtgaagtgcggcgaacaggggggagagtgctgatcactctcggggaccaggacatagacctgtcgccatcgtttgtcatcttcctgtccacccgggatccaactgtcgagttcccaccagatctctgttcccgggttacttttgtaaacttcacagttacccgtagcagtttacaaagccagtgtctaaatgaagtacttaaagcagaaagacctgatgtggacgagaaacgatctgatcttcttaaacttcaaggggaatttcagctccgtttgcgtcagctggaaaaatctctactacaagctctgaacgaggtgaaagggcgcattttggatgacgacacgatcataaccactctggagaacctgaagagagaggctgcagaggtcaccaggaaagttgaggagacggacattgtcatgcaggaggtggagaccgtgtcccagcagtacctcccgctctccaccgcctgcagcagcatctacttcaccatggagtccctcaagcagatacacttcttgtaccagtactccctccagtttttcctggacatttatcacaacgtcctatacgagaacccgaacctgaagggtgtcaccgaccacacacagcgcctgtccattataacaaaggacctcttccaggtggcgtttaaccgagtggctcgaggcatgctgcatcaggaccacattacctttgccatgctgctggcaagaatcaaactgaagggcaccgtgggggagcccacctacgatgcagaattccagcacttcttgagaggaaatgagattgtcctgagtgctggctccacccccaggatccagggcctgactgtggagcaggcggaggcggtggtgaggctgagctgccttcccgcgtttaaggacttgattgcaaaggttcaggcagacgagcaatttggcatctggctggacagcagctccccggagcagactgtgccctacctctggagtgaagaaacacctgcaacacccattggccaggccatccaccgcctgctcctgatccaggctttccggcccgatcgcctgttggccatggcccacatgtttgtttcaacaaaccttggggagtctttcatgtccatcatggagcagccgctcgacctgacccacattgtgggcacagaggtgaagcccaacactcctgtcttaatgtgctctgtgcctggttatgatgccagtggacatgtcgaggaccttgcagccgagcagaacacgcagatcacttcaattgcaatcggctctgcagaaggctttaaccaagcagataaggcaataaacaccgctgtaaagtcgggcaggtgggtgatgctgaagaatgtgcatctggccccagggtggctgatgcagctggagaagaagttgcattccctgcagccgcatgcctgcttccgactcttcctcaccatggagatcaaccccaaggtgcctgtgaatctgctccgtgcgggccgcatctttgtgttcgagccaccgccaggggtgaaggccaacatgctgaggacgttcagcagcattcccgtctcacggatatgcaagtctcccaacgagcgtgcccgcttgtacttcctgctggcctggtttcatgcgatcatccaagaacgcttacgatacgcaccactggggtggtcaaagaagtatgaatttggagagtctgacctgcggtcagcttgcgatacggtggacacgtggctggatgacacggccaagggcaggcagaacatctcaccggataagatcccgtggtctgcactaaagaccttaatggcccagtccatttatggcgggcgcgtggacaacgagtttgaccagcgtctgctcaacaccttcctggagcgcctgttcacaaccaggagtttcgacagtgagtttaagctggcatgcaaggtcgacggacataaagacattcaaatgccagatggcatcaggcgagaggagtttgtgcagtgggtggagttgctccccgacacccagacgccctcctggctgggcctgcccaacaacgccgagagagtcctccttaccacacagggtgtggacatgatcagtaaaatgctgaagatgcagatgttggaggatgaggacgacctggcctacgcagagactgagaagaagacgaggacagactccacgtccgacgggcgccctgcctggatgcggacactgcacaccaccgcgtccaactggctgcacctcatcccccagacgctgagccacctcaagcgcaccgtggagaatatcaaggatcctttgttcaggttctttgagagagaagtgaagatgggcgcaaagctgcttcaggacgttcgccaggaccttgcagatgtcgtccaggtgtgcgaaggaaagaagaagcagaccaactacttgcgcacgctgatcaacgagctagtgaaagggatcttgcctcggagctggtcccactacacggtgcctgccggcatgaccgtcatccagtgggtgtccgacttcagcgagaggatcaaacagctgcagaacatctcactggcagctgcatctggtggcgccaaggagctaaagaacatccacgtgtgcctgggtggcctgttcgtgcctgaggcgtacatcactgccaccaggcagtatgtggcccaggccaacagctggtccctggaggagctctgcctggaagtcaacgtcaccacctcacagggcgccacccttgacgcttgcagcttcggagtcacgggtttgaaacttcaaggggccacgtgcaacaacaacaagctgtcactgtccaatgccatctcaaccgcccttcccctgacgcagctgcgctgggtcaagcagacaaacaccgagaagaaggccagtgtggtaaccttacctgtctacctgaacttcacccgtgcagacctcatcttcaccgtggacttcgaaattgctacaaaggaggatcctcgcagcttctacgagcggggtgtcgcagtcttgtgcacagagtaa

SEQ ID NO: 465 - DNA, 411 bp, Homo Sapiens
atgggcaagttcatgaaacctgggaaggtggtgcttgtcctggctggacgctactccggacgcaaagctgtcatcgtgaagaacattgatgatggcacctcagatcgcccctacagccatgctctggtggctggaattgaccgctacccccgcaaagtgacagctgccatgggcaagaagaagatcgccaagagatcaaagataaaatcttttgtgaaagtgtataactacaatcacctaatgcccacaaggtactctgtggatatccccttggacaaaactgtcgtcaataaggatgtcttcagagatcctgctcttaaacgcaaggcccgacgggaggccaaggtcaagtttgaagagagatacaagacaggcaagaacaagtggttcttccagaaactgcggttttag

SEQ ID NO: 466 - DNA, 1680 bp, Homo Sapiens
atgccgctagtgaaaagaaacatcgatcctaggcacttgtgccacacagcactgcctagaggcattaagaatgaactggaatgtgtaaccaatatttccttggcaaatataattagacaactaagtagcctaagtaaatatgctgaagatatatttggagaattattcaatgaagcacatagtttttccttcagagtcaactcattgcaagaacgtgtggaccgtttatctgttagtgttacacagcttgatccaaaggaagaagaattgtctttgcaagatataacaatgaggaaagctttccgaagttctacaattcaagaccagcagcttttcgatcgcaagactttgcctattccattacaggagacgtacgatgtttgtgaacagcctccacctctcaatatactcactccttatagagatgatggtaaagaaggtctgaagttttataccaatccttcgtatttctttgatctatggaaagaaaaaatgttgcaagatacagaggataagaggaaggaaaagaggaagcagaagcagaaaaatctagatcgtcctcatgaaccagaaaaagtgccaagagcacctcatgacaggcggcgagaatggcagaagctggcccaaggtccagagctggctgaagatgatgctaatctcttacataagcatattgaagttgctaatggcccagcctctcattttgaaacaagacctcagacatacgtggatcatatggatggatcttactcactttctgccttgccatttagtcagatgagtgagcttctgactagagctgaggaaagggtattagtcagaccacatgaaccacctccacctccaccaatgcatggagcaggagatgcaaaaccgatacccacctgtatcagttctgctacaggtttgatagaaaatcgccctcagtcaccagctacaggcagaacacctgtgtttgtgagccccactcccccacctcctccaccacctcttccatctgccttgtcaacttcctcattaagagcttcaatgacttcaactcctccccctccagtacctcccccacctccacctccagccactgctttgcaagctccagcagtaccaccacctccagctcctcttcagattgcccctggagttcttcacccagctcctcctccaattgcacctcctctagtacagccctctccaccagtagctagagctgccccagtatgtgagactgtaccagttcatccactcccacaaggtgaagttcaggggctgcctccacccccaccaccgcctcctctgcctccacctggcattcgaccatcatcacctgtcacagttacagctcttgctcatcctccctctgggctacatccaactccatctactgccccaggtccccatgttccattaatgcctccatctcctccatcacaagttatacctgcttctgagccaaagcgccatccatcaaccctacctgtaatcagtgatgccaggagtgtgctactggaagcaatacgaaaaggtattcagctacgcaaagtagaagagcagcgtgaacaggaagctaagcatgaacgcattgaaaacgatgttgccaccatcctgtctcgccgtattgctgttgaatatagtgattcggaagatgattcagaatttgatgaagtagattggttggagtaa

SEQ ID NO: 467 - DNA, 711 bp, Homo Sapiens
atggctgagctggatccgttcggcgcccctgccggcgcccctggcggtcccgcgctggggaacggagtggccggcgccggcgaagaagacccggctgcggccttcttggcgcagcaagagagcgagattgcgggcatcgagaacgacgaggccttcgccatcctggacggcggcgcccccgggccccagccgcacggcgagccgccggggggtccggatgctgttgatggagtaatgaatggtgaatactaccaggaaagtaatggtccaacagacagttatgcagctatttcacaagtggatcgattgcagtcagagcctgaaagtatccgtaaatggagagaagaacaaatggaacgcttggaagcccttgatgccaattctcggaagcaagaagcagagtggaaagaaaaggcaataaaggagctagaagaatggtatgcaagacaggacgagcagctacagaaaacaaaagcaaacaacagggtggcagatgaagctttctacaaacaacccttcgctgacgtgattggttatgtggcagcagaagaagcctttgtaaatgacattgacgagtcgtccccaggcactgagtgggaacgggtggcccggctgtgtgactttaaccccaagtctagcaagcaggccaaagatgtctcccgcatgcgctcagtcctcatctccctcaagcaggccccgctggtgcactga

SEQ ID NO: 468 - DNA, 441 bp, Homo Sapiens
atgccgtccaagggcccgctgcagtctgtgcaggtcttcggacgcaagaagacagcgacagctgtggcgcactgcaaacgcggcaatggtctcatcaaggtgaacgggcggcccctggagatgattgagccgcgcacgctacagtacaagctgctggagccagttctgcttctcggcaaggagcgatttgctggtgtagacatccgtgtccgtgtaaagggtggtggtcacgtggcccagatttatgctatccgtcagtccatctccaaagccctggtggcctattaccagaaatatgtggatgaggcttccaagaaggagatcaaagacatcctcatccagtatgaccggaccctgctggtagctgaccctcgtcgctgcgagtccaaaaagtttggaggccctggtgcccgcgctcgctaccagaaatcctaccgataa

SEQ ID NO: 469 - DNA, 1515 bp, Homo Sapiens
atggaggcgcctttgcagacagagatggtggagctggtgcccaatggcaaacactcagaggggctgctcccggtcatcacccccatggcaggcaaccagagggtcgaggaccctgcacggagctgtatggagggcaagagcttcctacagaaaagtcccagcaaggagccacacttcactgacttcgaggggaagacatcattcgggatgtcagtgttcaacctcagcaatgccatcatgggcagcggcatcctgggactcgcctatgccatggccaatacgggcattatccttttcctgttcctgttgacagctgtcgccttgctctccagctactccatccacctgctactcaagtcctcaggggtcgtgggcatccgtgcctatgagcagctgggctaccgtgcctttgggaccccaggaaagctggcagcagccctggccatcacgctccagaacatcggagccatgtccagctacctgtacatcatcaagtctgagctgccacttgtcatacagaccttcctgaacctggaggagaaaacctcggactggtacatgaacgggaactacctggtaatccttgtctctgtcaccatcattctgcccctggcactgatgcggcagcttggctacctgggctactccagcggcttctctcttagctgcatggtgttcttcctaattgcagtcatctacaaaaagttccacgtgccctgcccactgccccccaacttcaacaacaccacaggcaacttcagccacgtggagatcgtgaaggagaaggtgcagctgcaggtcgagcctgaggcttcagccttctgcactcccagctacttcacgctcaactcacagacagcatacaccatccccatcatggccttcgccttcgtctgccaccccgaggtgctgcccatctatactgagctcaaggacccctccaagaagaagatgcagcacatctccaacctgtccatcgctgtcatgtacatcatgtacttcctggctgccctcttcggctacctcaccttctacaacggggtggagtcggagctgctgcacacctacagcaaggtggacccgtttgacgtcctgatcctgtgtgtgcgcgtggccgtgctgacagcagtcacgctcacagtgcccatcgttctgttcccggtgcgccgcgccatccagcagatgctgtttccaaaccaggagttcagctggctgcggcatgtgcttattgccgttggcctgctcacttgtatcaacctgctggtcatctttgcccccaacatcctgggcatctttggggtcatcggtgccacatctgccccattcctcatcttcatcttccctgccatcttctacttccgaatcatgcccacggagaaggagcctgcaagatccacccccaaaatcctggccctgtgttttgctatgcttggcttcttgctgatgaccatgagcttgagcttcatcatcattgactgggcctcagggaccagccggcatggaggaaaccactag

SEQ ID NO: 470 - DNA, 582 bp, Homo Sapiens
atgcctgtctggggaggtggaaacaagtgtggggcctgtgggaggaccgtgtaccacgcagaagaggtgcagtgtgatggcaggagcttccaccgctgctgctttctctgcatggtttgcaggaaaaatttagatagcacaacagtggcaattcacgatgaagagatctactgcaaatcctgctacggaaagaagtatgggccaaaaggctacggttatggccagggcgctggcacgcttaacatggaccgtggcgagaggctgggcatcaaaccagagagtgttcagcctcacaggcctacaacaaatccaaacacttctaaatttgctcagaaatatggaggtgctgagaagtgttccagatgtggggattctgtatatgctgccgagaagataattggagctggaaagccctggcacaaaaactgtttccgatgtgcaaagtgtgggaagagtcttgaatcaacaactctgactgaaaaagaaggtgaaatctattgtaaaggatgctatgcaaagaactttgggcccaagggatttggctatggccaaggagcaggggctcttgttcatgcccagtaa

SEQ ID NO: 471 - DNA, 2043 bp, Homo Sapiens
atgatcaacatgggagactcccacgtggacaccagctccaccgtgtccgaggcggtggccgaagaagtatctcttttcagcatgacggacatgattctgttttcgctcatcgtgggtctcctaacctactggttcctcttcagaaagaaaaaagaagaagtccccgagttcaccaaaattcagacattgacctcctctgtcagagagagcagctttgtggaaaagatgaagaaaacggggaggaacatcatcgtgttctacggctcccagacggggactgcagaggagtttgccaaccgcctgtccaaggacgcccaccgctacgggatgcgaggcatgtcagcggaccctgaggagtatgacctggccgacctgagcagcctgccagagatcgacaacgccctggtggttttctgcatggccacctacggtgagggagaccccaccgacaatgcccaggacttctacgactggctgcaggagacagacgtggatctctctggggtcaagttcgcggtgtttggtcttgggaacaagacctacgagcacttcaatgccatgggcaagtacgtggacaagcggctggagcagctcggcgcccagcgcatctttgagctggggttgggcgacgacgatgggaacttggaggaggacttcatcacctggcgagagcagttctggccggccgtgtgtgaacactttggggtggaagccactggcgaggagtccagcattcgccagtacgagcttgtggtccacaccgacatagatgcggccaaggtgtacatgggggagatgggccggctgaagagctacgagaaccagaagcccccctttgatgccaagaatccgttcctggctgcagtcaccaccaaccggaagctgaaccagggaaccgagcgccacctcatgcacctggaattggacatctcggactccaaaatcaggtatgaatctggggaccacgtggctgtgtacccagccaacgactctgctctcgtcaaccagctgggcaaaatcctgggtgccgacctggacgtcgtcatgtccctgaacaacctggatgaggagtccaacaagaagcacccattcccgtgccctacgtcctaccgcacggccctcacctactacctggacatcaccaacccgccgcgtaccaacgtgctgtacgagctggcgcagtacgcctcggagccctcggagcaggagctgctgcgcaagatggcctcctcctccggcgagggcaaggagctgtacctgagctgggtggtggaggcccggaggcacatcctggccatcctgcaggactgcccgtccctgcggccccccatcgaccacctgtgtgagctgctgccgcgcctgcaggcccgctactactccatcgcctcatcctccaaggtccaccccaactctgtgcacatctgtgcggtggttgtggagtacgagaccaaggctggccgcatcaacaagggcgtggccaccaactggctgcgggccaaggagcctgccggggagaacggcggccgtgcgctggtgcccatgttcgtgcgcaagtcccagttccgcctgcccttcaaggccaccacgcctgtcatcatggtgggccccggcaccggggtggcacccttcataggcttcatccaggagcgggcctggctgcgacagcagggcaaggaggtgggggagacgctgctgtactacggctgccgccgctcggatgaggactacctgtaccgggaggagctggcgcagttccacagggacggtgcgctcacccagctcaacgtggccttctcccgggagcagtcccacaaggtctacgtccagcacctgctaaagcaagaccgagagcacctgtggaagttgatcgaaggcggtgcccacatctacgtctgtggggatgcacggaacatggccagggatgtgcagaacaccttctacgacatcgtggctgagctcggggccatggagcacgcgcaggcggtggactacatcaagaaactgatgaccaagggccgctactccctggacgtgtggagctag

SEQ ID NO: 472 - DNA, 2508 bp, Homo Sapiens
atgaagaggagaactgacccagaatgcactgcccccatcaagaaacagaaaaaaagagttgcagagcttgccctgagcctcagctccacgtccgatgatgaacctccctcctctgtcagtcatggagcaaaagcatctactacaagccttagtgggtctgatagtgagaccgaggggaaacaacacagctctgactcttttgacgatgcattcaaagcagactctcttgtggaaggaacttcttctcgctattccatgtataatagcgtctcccagaagcttatggccaagatgggcttcagggaaggtgaaggattgggtaaatacagccagggtcggaaggacatcgttgaggcttccagtcagaaaggtcgaagaggcttgggtctgacactccggggctttgaccaggagctgaacgtggactggcgagatgagccagagcccagtgcttgtgagcaggtgtcatggtttccagaatgtaccactgaaattcctgacactcaggaaatgagcgattggatggtggtgggaaagagaaagatgattattgaagatgaaacagagttttgtggggaagagctgcttcacagtgtgttgcagtgtaagagcgtgtttgatgtcttggatggggaagagatgcggcgagctcggactcgggccaatccctatgagatgatccgaggagtcttctttctaaacagggcagcaatgaagatggctaacatggattttgtatttgatcgcatgttcacaaatccgcgggactcttatgggaagccactggtgaaggaccgggaagctgagcttctgtactttgctgatgtctgcgcaggcccaggtggcttctcagagtatgtgctgtggaggaagaagtggcatgcaaagggctttggaatgactttgaagggccctaatgacttcaagctggaggacttctactctgcttccagtgaactcttcgaaccctactatggtgagggtgggattgatggagatggagatatcacccgcccagagaacatctctgcttttcggaattttgtcctggataacacagatcgcaagggtgtccattttctgatggctgatgggggtttctcggtggaggggcaggagaacctgcaggagatcctcagcaagcagctgcttctgtgtcagttcctcatggcgctgtccattgtccggacaggaggccacttcatctgtaaaacctttgacctgttcacaccgtttagtgtggggcttgtctacctgctgtactgctgctttgaacgagtttgtctcttcaagcctattaccagccgtcctgccaactcagagaggtatgtggtgtgcaagggcctgaaggtgggcatagatgatgttcgggattacctcttcgcagtgaatattaaactcaatcagctgcggaacacggattccgacgtcaacttggtggtccccctggaggtgatcaagggagaccatgaatttactgactacatgatacggtccaatgagagccactgtagtctgcagatcaaagctctggcgaaaatccatgcctttgttcaagacacgacactgagtgagcctcgacaggcagagatacggaaggagtgcctccgactctgggggatcccagaccaggctcgtgtggctccttcttcctccgaccctaaatcgaagttctttgagctaatccagggcactgagattgacatcttcagctacaagcccacactgctcacctctaaaaccctggagaagatccgccctgtgtttgactaccgctgcatggtatctggcagtgagcagaagttcctcatcggcctggggaaatcccagatctacacatgggatggccgccagtcagaccgctggatcaagctagacctgaagacagagctgccccgggacactctgctatctgtggaaattgtgcatgagctgaaaggggaggggaaggcccagaggaagatcagtgccatccacatcctcgatgtccttgtgctgaatggcaccgacgttcgggagcagcactttaaccagcgaattcagcttgccgagaaatttgtgaaagccgtttccaagcctagtcggcccgacatgaatcccatcagggtgaaggaggtgtacagactggaagagatggagaagatttttgtcaggttggagatgaagatcatcaagggctccagtggcaccccaaagctcagctacacagggcgtgatgaccggcactttgtacccatgggcctctacatcgtcaggacagtgaatgagccctggactatgggattcagcaaaagcttcaagaagaagttcttctacaacaagaaaaccaaggactctacttttgacctccctgcagactccattgccccatttcacatttgctactatggccggctcttctgggagtggggggatggcattcgtgtgcatgactcccagaagccccaggaccaggacaagctgtccaaggaggacgtcctctccttcatccagatgcacagggcctaa

SEQ ID NO: 473 - DNA, 5883 bp, Homo Sapiens
atggcacagcaagctgccgataagtatctctatgtggataaaaacttcatcaacaatccgctggcccaggccgactgggctgccaagaagctggtatgggtgccttccgacaagagtggctttgagccagccagcctcaaggaggaggtgggcgaagaggccatcgtggagctggtggagaatgggaagaaggtgaaggtgaacaaggatgacatccagaagatgaacccgcccaagttctccaaggtggaggacatggcagagctcacgtgcctcaacgaagcctcggtgctgcacaacctcaaggagcgttactactcagggctcatctacacctattcaggcctgttctgtgtggtcatcaatccttacaagaacctgcccatctactctgaagagattgtggaaatgtacaagggcaagaagaggcacgagatgccccctcacatctatgccatcacagacaccgcctacaggagtatgatgcaagaccgagaagatcaatccatcttgtgcactggtgaatctggagctggcaagacggagaacaccaagaaggtcatccagtatctggcgtacgtggcgtcctcgcacaagagcaagaaggaccagggcgagctggagcggcagctgctgcaggccaaccccatcctggaggccttcgggaacgccaagaccgtgaagaatgacaactcctcccgcttcggcaaattcattcgcatcaactttgatgtcaatggctacattgttggagccaacattgagacttatcttttggagaaatctcgtgctatccgccaagccaaggaagaacggaccttccacatcttctattatctcctgtctggggctggagagcacctgaagaccgatctcctgttggagccgtacaacaaataccgcttcctgtccaatggacacgtcaccatccccgggcagcaggacaaggacatgttccaggagaccatggaggccatgaggattatgggcatcccagaagaggagcaaatgggcctgctgcgggtcatctcaggggttcttcagctcggcaacatcgtcttcaagaaggagcggaacactgaccaggcgtccatgcccgacaacacagctgcccaaaaggtgtcccatctcttgggtatcaatgtgaccgatttcaccagaggaatcctcaccccgcgcatcaaggtgggacgggattacgtccagaaggcgcagactaaagagcaggctgactttgccatcgaggccttggccaaggcgacctatgagcggatgttccgctggctggtgctgcgcatcaacaaggctctggacaagaccaagaggcagggcgcctccttcatcgggatcctggacattgccggcttcgagatctttgatctgaactcgtttgagcagctgtgcatcaattacaccaatgagaagctgcagcagctcttcaaccacaccatgttcatcctggagcaggaggagtaccagcgcgagggcatcgagtggaacttcatcgactttggcctcgacctgcagccctgcatcgacctcattgagaagccagcaggccccccgggcattctggccctgctggacgaggagtgctggttccccaaagccaccgacaagagcttcgtggagaaggtgatgcaggagcagggcacccaccccaagttccagaagcccaagcagctgaaggacaaagctgatttctgcattatccactatgccggcaaggtggattacaaagctgacgagtggctgatgaagaacatggatcccctgaatgacaacatcgccacactgctccaccagtcctctgacaagtttgtctcggagctgtggaaggatgtggaccgcatcatcggcctggaccaggtggccggcatgtcggagaccgcactgcccggggccttcaagacgcggaagggcatgttccgcactgtggggcagctttacaaggagcagctggccaagctgatggctacgctgaggaacacgaaccccaactttgtccgctgcatcatccccaaccacgagaagaaggccggcaagctggacccgcatctcgtgctggaccagctgcgctgcaacggtgttctcgagggcatccgtatctgccgccagggcttccccaacagggtggtcttccaggagtttcggcagagatatgagatcctgactccaaactccattcccaagggtttcatggacgggaagcaggcgtgcgtgctcatgataaaagccctggagctcgacagcaatctgtaccgcattggccagagcaaagtcttcttccgtgccggtgtgctggcccacctggaggaggagcgagacctgaagatcaccgacgtcatcatagggttccaggcctgctgcaggggctacctggccaggaaagcatttgccaagcggcagcagcagcttaccgccatgaaggtcctccagcggaactgcgctgcctacctgaagctgcggaactggcagtggtggcggctcttcaccaaggtcaagccgctgctgcaggtgagccggcaggaggaggagatgatggccaaggaggaggagctggtgaaggtcagagagaagcagctggctgcggagaacaggctcacggagatggagacgctgcagtctcagctcatggcagagaaattgcagctgcaggagcagctccaggcagaaaccgagctgtgtgccgaggctgaggagctccgggcccgcctgaccgccaagaagcaggaattagaagagatctgccatgacctagaggccagggtggaggaggaggaggagcgctgccagcacctgcaggcggagaagaagaagatgcagcagaacatccaggagcttgaggagcagctggaggaggaggagagcgcccggcagaagctgcagctggagaaggtgaccaccgaggcgaagctgaaaaagctggaggaggagcagatcatcctggaggaccagaactgcaagctggccaaggaaaagaaactgctggaagacagaatagctgagttcaccaccaacctcacagaagaggaggagaaatctaagagcctcgccaagctcaagaacaagcatgaggcaatgatcactgacttggaagagcgcctccgcagggaggagaagcagcgacaggagctggagaagacccgccggaagctggagggagactccacagacctcagcgaccagatcgccgagctccaggcccagatcgcggagctcaagatgcagctggccaagaaagaggaggagctccaggccgccctggccagagtggaagaggaagctgcccagaagaacatggccctcaagaagatccgggagctggaatctcagatctctgaactccaggaagacctggagtctgagcgtgcttccaggaataaagctgagaagcagaaacgggaccttggggaagagctagaggctctgaaaacagagttggaggacacgctggattccacagctgcccagcaggagctcaggtcaaaacgtgagcaggaggtgaacatcctgaagaagaccctggaggaggaggccaagacccacgaggcccagatccaggagatgaggcagaagcactcacaggccgtggaggagctggcggagcagctggagcagacgaagcgggtgaaagcaaacctcgagaaggcaaagcagactctggagaacgagcggggggagctggccaacgaggtgaaggtgctgctgcagggcaaaggggactcggagcacaagcgcaagaaagtggaggcgcagctgcaggagctgcaggtcaagttcaacgagggagagcgcgtgcgcacagagctggccgacaaggtcaccaagctgcaggtggagctggacaacgtgaccgggcttctcagccagtccgacagcaagtccagcaagctcaccaaggacttctccgcgctggagtcccagctgcaggacactcaggagctgctgcaggaggagaaccggcagaagctgagcctgagcaccaagctcaagcaggtggaggacgagaagaattccttccgggagcagctggaggaggaggaggaggccaagcacaacctggagaagcagatcgccaccctccatgcccaggtggccgacatgaaaaagaagatggaggacagtgtggggtgcctggaaactgctgaggaggtgaagaggaagctccagaaggacctggagggcctgagccagcggcacgaggagaaggtggccgcctacgacaagctggagaagaccaagacgcggctgcagcaggagctggacgacctgctggtggacctggaccaccagcgccagagcgcgtgcaacctggagaagaagcagaagaagtttgaccagctcctggcggaggagaagaccatctctgccaagtatgcagaggagcgcgaccgggctgaggcggaggcccgagagaaggagaccaaggctctgtcgctggcccgggccctggaggaagccatggagcagaaggcggagctggagcggctcaacaagcagttccgcacggagatggaggaccttatgagctccaaggatgatgtgggcaagagtgtccacgagctggagaagtccaagcgggccctagagcagcaggtggaggagatgaagacgcagctggaagagctggaggacgagctgcaggccaccgaagatgccaagctgcggttggaggtcaacctgcaggccatgaaggcccagttcgagcgggacctgcagggccgggacgagcagagcgaggagaagaagaagcagctggtcagacaggtgcgggagatggaggcagagctggaggacgagaggaagcagcgctcgatggcagtggccgcccggaagaagctggagatggacctgaaggacctggaggcgcacatcgactcggccaacaagaaccgggacgaagccatcaaacagctgcggaagctgcaggcccagatgaaggactgcatgcgcgagctggatgacacccgcgcctctcgtgaggagatcctggcccaggccaaagagaacgagaagaagctgaagagcatggaggccgagatgatccagttgcaggaggaactggcagccgcggagcgtgccaagcgccaggcccagcaggagcgggatgagctggctgacgagatcgccaacagcagcggcaaaggagccctggcgttagaggagaagcggcgtctggaggcccgcatcgcccagctggaggaggagctggaggaggagcagggcaacacggagctgatcaacgaccggctgaagaaggccaacctgcagatcgaccagatcaacaccgacctgaacctggagcgcagccacgcccagaagaacgagaatgctcggcagcagctggaacgccagaacaaggagcttaaggtcaagctgcaggagatggagggcactgtcaagtccaagtacaaggcctccatcaccgccctcgaggccaagattgcacagctggaggagcagctggacaacgagaccaaggagcgccaggcagcctgcaaacaggtgcgtcggaccgagaagaagctgaaggatgtgctgctgcaggtggatgacgagcggaggaacgccgagcagtacaaggaccaggccgacaaggcatctacccgcctgaagcagctcaagcggcagctggaggaggccgaagaggaggcccagcgggccaacgcctcccgccggaaactgcagcgcgagctggaggacgccactgagacggccgatgccatgaaccgcgaagtcagctccctaaagaacaagctcaggcgcggggacctgccgtttgtcgtgccccgccgaatggcccggaaaggcgccggggatggctccgacgaagaggtagatggcaaagcggatggggctgaggccaaacctgccgaataa

SEQ ID NO: 474 - DNA, 333 bp, Homo Sapiens
atgtctggaaggctgtggtccaaggccatttttgctggctataagcggggtctccggaaccaaagggagcacacagctcttcttaaaattgaaggtgtttacgcccgagatgaaacagaattctatttgggcaagagatgcgcttatgtatataaagcaaagaacaacacagtcactcctggcggcaaaccaaacaaaaccagagtcatctggggaaaagtaactcgggcccatggaaacagtggcatggttcgtgccaaattccgaagcaatcttcctgctaaggccattggacacagaatccgagtgatgctgtacccctcaaggatttaa

SEQ ID NO: 475 - DNA, 1005 bp, Homo Sapiens
atggcaactcttaaggaaaaactcattgcaccagttgcggaagaagaggcaacagttccaaacaataagatcactgtagtgggtgttggacaagttggtatggcgtgtgctatcagcattctgggaaagtctctggctgatgaacttgctcttgtggatgttttggaagataagcttaaaggagaaatgatggatctgcagcatgggagcttatttcttcagacacctaaaattgtggcagataaagattattctgtgaccgccaattctaagattgtagtggtaactgcaggagtccgtcagcaagaaggggagagtcggctcaatctggtgcagagaaatgttaatgtcttcaaattcattattcctcagatcgtcaagtacagtcctgattgcatcataattgtggtttccaacccagtggacattcttacgtatgttacctggaaactaagtggattacccaaacaccgcgtgattggaagtggatgtaatctggattctgctagatttcgctaccttatggctgaaaaacttggcattcatcccagcagctgccatggatggattttgggggaacatggcgactcaagtgtggctgtgtggagtggtgtgaatgtggcaggtgtttctctccaggaattgaatccagaaatgggaactgacaatgatagtgaaaattggaaggaagtgcataagatggtggttgaaagtgcctatgaagtcatcaagctaaaaggatataccaactgggctattggattaagtgtggctgatcttattgaatccatgttgaaaaatctatccaggattcatcccgtgtcaacaatggtaaaggggatgtatggcattgagaatgaagtcttcctgagccttccatgtatcctcaatgcccggggattaaccagcgttatcaaccagaagctaaaggatgatgaggttgctcagctcaagaaaagtgcagataccctgtgggacatccagaaggacctaaaagacctgtga

SEQ ID NO: 476 - DNA, 387 bp, Homo Sapiens
atggagtccaaagaggaacgagcgttaaacaatctcatcgtggaaaatgtcaaccaggaaaatgatgaaaaagatgaaaaggagcaagttgctaataaaggggagcccttggccctacctttgaatgttagtgaatactgtgtgcctagaggaaaccgtaggcggttccgcgttaggcagcccatcctgcagtatagatgggacataatgcataggcttggagagccacaggcaaggatgagagaggagaatatggaaaggattggggaggaggtgagacagctgatggaaaagctgagggaaaagcagttgagtcatagtttgcgggcagtcagcactgatccccctcaccatgaccatcacgatgagttttgccttatgccctga

SEQ ID NO: 477 - DNA, 1140 bp, Homo Sapiens
atgggctgcctcgggaacagtaagaccgaggaccagcgcaacgaggagaaggcgcagcgtgaggccaacaaaaagatcgagaagcagctgcagaaggacaagcaggtctaccgggccacgcaccgcctgctgctgctgggtgctggagaatctggtaaaagcaccattgtgaagcagatgaggatcctgcatgttaatgggtttaatggagatgagaaggcaaccaaagtgcaggacatcaaaaacaacctgaaagaggcgattgaaaccattgtggccgccatgagcaacctggtgccccccgtggagctggccaaccccgagaaccagttcagagtggactacatcctgagtgtgatgaacgtgcctgactttgacttccctcccgaattctatgagcatgccaaggctctgtgggaggatgaaggagtgcgtgcctgctacgaacgctccaacgagtaccagctgattgactgtgcccagtacttcctggacaagatcgacgtgatcaagcaggctgactatgtgccgagcgatcaggacctgcttcgctgccgtgtcctgacttctggaatctttgagaccaagttccaggtggacaaagtcaacttccacatgtttgacgtgggtggccagcgcgatgaacgccgcaagtggatccagtgcttcaacgatgtgactgccatcatcttcgtggtggccagcagcagctacaacatggtcatccgggaggacaaccagaccaaccgcctgcaggaggctctgaacctcttcaagagcatctggaacaacagatggctgcgcaccatctctgtgatcctgttcctcaacaagcaagatctgctcgctgagaaagtccttgctgggaaatcgaagattgaggactactttccagaatttgctcgctacactactcctgaggatgctactcccgagcccggagaggacccacgcgtgacccgggccaagtacttcattcgagatgagtttctgaggatcagcactgccagtggagatgggcgtcactactgctaccctcatttcacctgcgctgtggacactgagaacatccgccgtgtgttcaacgactgccgtgacatcattcagcgcatgcaccttcgtcagtacgagctgctctaa

SEQ ID NO: 478 - DNA, 1569 bp, Homo Sapiens
atggagtttccagaccatagtagacatttgctacagtgtctgagcgagcagagacaccagggttttctttgtgactgcactgttctggtgggagatgcccagttccgagcgcaccgagctgtactggcttcatgcagcatgtatttccacctcttttacaaggaccagctggacaaaagagacattgttcatctgaacagcgacattgttacagcccccgctttcgctctcctgcttgaattcatgtatgaagggaaactccagttcaaagacttgcccattgaagacgtgctagcagctgccagttatctccacatgtatgacattgtcaaagtctgcaaaaagaagctgaaagagaaagccaccacggaggcagacagcaccaaaaaggaagaagatgcttcaagttgttcggacaaagtcgagagtctctccgatggcagcagccacatagcaggcgatttgcccagtgatgaagatgaaggagaagatgaaaaattgaacatcctgcccagcaaaagggacttggcggccgagcctgggaacatgtggatgcgattgccctcagactcagcaggcatcccccaggctggcggagaggcagagccacacgccacagcagctggaaaaacagtagccagcccctgcagctcaacagagtctttgtcccagaggtctgtcacctccgtgagggattcggcagatgttgactgtgtgctggacctgtctgtcaagtccagcctttcaggagttgaaaatctgaacagctcttatttctcttcacaggacgtgctgagaagcaacctggtgcaggtgaaggtggagaaagaggcttcctgtgatgagagtgatgttggcactaatgactatgacatggaacatagcactgtgaaagaaagtgtgagcactaataacagggtacagtatgagccggcccatctggctcccctgagggaggactcggtcttgagggagctggaccgggaggacaaagccagtgatgatgagatgatgaccccagagagcgagcgtgtccaggtggagggaggcatggagagcagtctgctcccctacgtctccaacatcctgagccccgcgggccagatcttcatgtgccccctgtgcaacaaggtcttccccagcccccacatcctgcagatccacctgagcacgcacttccgcgagcaggacggcatccgcagcaagcccgccgccgatgtcaacgtgcccacgtgctcgctgtgtgggaagactttctcttgcatgtacaccctcaagcgccacgagaggactcactcgggggagaagccctacacatgcacccagtgcggcaagagcttccagtactcgcacaacctgagccgccatgccgtggtgcacacccgcgagaagccgcacgcctgcaagtggtgcgagcgcaggttcacgcagtccggggacctgtacagacacattcgcaagttccactgtgagttggtgaactccttgtcggtcaaaagcgaagcactgagcttgcctactgtcagagactggaccttagaagatagctctcaagaactttggaaataa

SEQ ID NO: 479 - DNA, 1062 bp, Homo Sapiens
atgaacggagaccagaattcagatgtttatgcccaagaaaagcaggatttcgttcagcacttctcccagatcgttagggtgctgactgaggatgagatggggcacccagagataggagatgctattgcccggctcaaggaggtcctggagtacaatgccattggaggcaagtataaccggggtttgacggtggtagtagcattccgggagctggtggagccaaggaaacaggatgctgatagtctccagcgggcctggactgtgggctggtgtgtggaactgctgcaagctttcttcctggtggcagatgacatcatggattcatcccttacccgccggggacagatctgctggtatcagaagccgggcgtgggtttggatgccatcaatgatgctaacctcctggaagcatgtatctaccgcctgctgaagctctattgccgggagcagccctattacctgaacctgatcgagctcttcctgcagagttcctatcagactgagattgggcagaccctggacctcctcacagccccccagggcaatgtggatcttgtcagattcactgaaaagaggtacaaatctattgtcaagtacaagacagctttctactccttctaccttcctatagctgcagccatgtacatggcaggaattgatggcgagaaggagcacgccaatgccaagaagatcctgctggagatgggggagttctttcagattcaggatgattaccttgacctctttggggaccccagtgtgaccggcaaaattggcactgacatccaggacaacaaatgcagctggctggtggttcagtgtctgcaacgggccactccagaacagtaccagatcctgaaggaaaattacgggcagaaggaggctgagaaagtggcccgggtgaaggcgctatatgaggagctggatctgccagcagtgttcttgcaatatgaggaagacagttacagccacattatggctctcattgaacagtacgcagcacccctgcccccagccgtctttctggggcttgcgcgcaaaatctacaagcggagaaagtga

SEQ ID NO: 480 - DNA, 1008 bp, Homo Sapiens
atggcggtggacatcacgctgctattccgggccagcgtcaagaccgtgaagacgcggaacaaggcgctgggagtggcggtgggcggcggggtcgatggcagccgggacgagctgttccgccggagcccccggcccaagggcgacttctccagccgggcccgcgaagtgatttctcacattggcaaactgagagattttcttctggaacacaggaaagattatattaatgcttatagccataccatgtctgaatatgggaggatgacagacacagaacgagaccagatagaccaggatgcccagatattcatgaggacctgttcagaagcaattcagcaactacgaacagaagctcacaaggagatacattcccagcaagtgaaggagcacaggaccgctgttttggatttcattgaagattacttgaaaagagtatgtaaactttactcagaacagagagccatccgagttaaaagagtggtggataagaaaagattatctaagctggaaccagaaccaaatacaaagacaagagaatccacatcttctgagaaagtttcacagagtccttcaaaagactctgaagaaaaccctgccactgaagaacgtccagaaaaaattttggctgaaacacaacctgaattgggaacgtggggagatggcaaaggcgaagatgagttatccccagaagaaatacaaatgtttgaacaggaaaatcagcgactaattggtgaaatgaacagcttgtttgatgaagtgaggcaaatcgaagggagagtggttgagatttccagactccaagagatattcacggaaaaggttttgcaacaggaagctgagattgacagcattcaccagttagttgtgggggcaactgaaaatatcaaggaaggcaacgaagacataagagaggccattaaaaacaacgctggcttccgcgtgtggatcctcttcttcctcgtgatgtgctccttctccttgctcttcctcgactggtacgacagctag

SEQ ID NO: 481 - DNA, 1344 bp, Homo Sapiens
atggacgaggaatacgatgtgatcgtgctggggaccggtctcaccgaatgcatcctgtcgggcatcatgtctgtgaacgggaagaaggtgctgcacatggaccggaacccctactacgggggcgagagctcctccatcacacccctggaggagctgtataagcgttttcagttgctggaggggccccctgagtcgatgggccgaggccgagactggaatgttgacctgattcccaaattcctcatggctaacgggcagctggtaaagatgctactgtatacagaggtgactcgctacctggacttcaaggtggtggagggcagctttgtctacaaggggggcaagatctacaaagtgccgtccactgagactgaggccttggcttccaatctgatgggcatgtttgagaaacggcgcttccgcaagttcctggtgtttgtggcaaacttcgatgagaatgaccccaagacctttgagggcgttgacccccagactaccagcatgcgtgacgtctaccggaagtttgatctgggccaggatgtcatcgatttcactggccatgccctggcgctctaccgcactgatgactacctggaccagccctgccttgagaccgtcaaccgcatcaagttgtacagtgagtccctggcccggtatggcaagagcccatatttatacccgctctacggcttgggcgagctgccccagggttttgcaagattgagtgccatctatggggggacatatatgctgaacaaacctgtggatgacatcatcatggagaacggcaaggtggtgggcgtgaagtctgagggagaggtggcccgctgcaagcagctgatctgtgaccccagctacatcccggaccgtgtgcggaaggctggccaggttatccgcatcatctgtatccttagccaccccatcaagaacaccaacgacgccaactcctgccaaataatcatcccccagaaccaggtcaacaggaagtcagacatctacgtgtgcatgatctcctatgcacacaacgtggcggcccagggcaagtacatagctattgccagcactactgtggagaccacggaccctgaaaaggaggtggagccggctctggagctgttggagcccattgaccagaagtttgtggctatcagtgacttgtatgagcccattgatgatggttgtgagagccaggtgttctgttcctgctcctacgatgccaccacacactttgagacaacctgcaacgacatcaaagacatctacaaacgcatggctggcacggcctttgactttgagaacatgaagcgcaaacagaacgacgtctttggagaagctgagcagtga

SEQ ID NO: 482 - DNA, 1134 bp, Homo Sapiens
atggaggcgctgctgctgggcgcggggttgctgctgggcgcttacgtgcttgtctactacaacctggtgaaggccccgccgtgcggcggcatgggcaacctgcggggccgcacggccgtggtcacgggcgccaacagcggcatcggaaagatgacggcgctggagctggcgcgccggggagcgcgcgtggtgctggcctgccgcagccaggagcgcggggaggcggctgccttcgacctccgccaggagagtgggaacaatgaggtcatcttcatggccttggacttggccagtctggcctcggtgcgggcctttgccactgcctttctgagctctgagccacggttggacatcctcatccacaatgccggtatcagttcctgtggccggacccgtgaggcgtttaacctgctgcttcgggtgaaccatatcggtccctttctgctgacacatctgctgctgccttgcctgaaggcatgtgcccctagccgcgtggtggtggtagcctcagctgcccactgtcggggacgtcttgacttcaaacgcctggaccgcccagtggtgggctggcggcaggagctgcgggcatatgctgacactaagctggctaatgtactgtttgcccgggagctcgccaaccagcttgaggccactggcgtcacctgctatgcagcccacccagggcctgtgaactcggagctgttcctgcgccatgttcctggatggctgcgcccacttttgcgcccattggcttggctggtgctccgggcaccaagagggggtgcccagacacccctgtattgtgctctacaagagggcatcgagcccctcagtgggagatattttgccaactgccatgtggaagaggtgcctccagctgcccgagacgaccgggcagcccatcggctatgggaggccagcaagaggctggcagggcttgggcctggggaggatgctgaacccgatgaagacccccagtctgaggactcagaggccccatcttctctaagcaccccccaccctgaggagcccacagtttctcaaccttaccccagccctcagagctcaccagatttgtctaagatgacgcaccgaattcaggctaaagttgagcctgagatccagctctcctaa

SEQ ID NO: 483 - DNA, 303 bp, Homo Sapiens
atgcccaagaggaaggtcagctccgccgaaggcgccgccaaggaagagcccaagaggagatcggcgcggttgtcagctaaacctcctgcaaaagtggaagcgaagccgaaaaaggcagcagcgaaggataaatcttcagacaaaaaagtgcaaacaaaagggaaaaggggagcaaagggaaaacaggccgaagtggctaaccaagaaactaaagaagacttacctgcggaaaacggggaaacgaagactgaggagagtccagcctctgatgaagcaggagagaaagaagccaagtctgattaa

SEQ ID NO: 484 - DNA, 1428 bp, Homo Sapiens
atggagagcaaagccctgctcgtgctgactctggccgtgtggctccagagtctgaccgcctcccgcggaggggtggccgccgccgaccaaagaagagattttatcgacatcgaaagtaaatttgccctaaggacccctgaagacacagctgaggacacttgccacctcattcccggagtagcagagtccgtggctacctgtcatttcaatcacagcagcaaaaccttcatggtgatccatggctggacggtaacaggaatgtatgagagttgggtgccaaaacttgtggccgccctgtacaagagagaaccagactccaatgtcattgtggtggactggctgtcacgggctcaggagcattacccagtgtccgcgggctacaccaaactggtgggacaggatgtggcccggtttatcaactggatggaggaggagtttaactaccctctggacaatgtccatctcttgggatacagccttggagcccatgctgctggcattgcaggaagtctgaccaataagaaagtcaacagaattactggcctcgatccagctggacctaactttgagtatgcagaagccccgagtcgtctttctcctgatgatgcagattttgtagacgtcttacacacattcaccagagggtcccctggtcgaagcattggaatccagaaaccagttgggcatgttgacatttacccgaatggaggtacttttcagccaggatgtaacattggagaagctatccgcgtgattgcagagagaggacttggagatgtggaccagctagtgaagtgctcccacgagcgctccattcatctcttcatcgactctctgttgaatgaagaaaatccaagtaaggcctacaggtgcagttccaaggaagcctttgagaaagggctctgcttgagttgtagaaagaaccgctgcaacaatctgggctatgagatcaataaagtcagagccaaaagaagcagcaaaatgtacctgaagactcgttctcagatgccctacaaagtcttccattaccaagtaaagattcatttttctgggactgagagtgaaacccataccaatcaggcctttgagatttctctgtatggcaccgtggccgagagtgagaacatcccattcactctgcctgaagtttccacaaataagacctactccttcctaatttacacagaggtagatattggagaactactcatgttgaagctcaaatggaagagtgattcatactttagctggtcagactggtggagcagtcccggcttcgccattcagaagatcagagtaaaagcaggagagactcagaaaaaggtgatcttctgttctagggagaaagtgtctcatttgcagaaaggaaaggcacctgcggtatttgtgaaatgccatgacaagtctctgaataagaagtcaggctga

SEQ ID NO: 485 - DNA, 531 bp, Homo Sapiens
atggctgcccgagggagacgggcggagcctcagggccgggaggctccgggccccgcgggcggtggcggtggcgggagccgttgggctgagtcgggatcggggacgtcgcccgagagcggggacgaggaggtgtcgggcgcgggttcgagcccggtgtcgggcggcgtgaacttgttcgccaacgacggcagcttcctggagctgttcaagcggaagatggaggaggagcagcggcagcggcaggaggagccgcccccgggtccgcagcgacccgaccagtcggccgccgccgctggccccggggatccgaagaggaagggcggtccgggctccacacttagcttcgtgggcaaacgcagaggcgggaacaaactagccctcaagacgggaatagtagccaagaagcagaagacggaggatgaggtattaacaagtaaaggtgacgcgtgggccaagtacatggcagaagtgaaaaagtacaaagctcaccagtgcggtgacgatgataaaactcggcccctggtgaaatga

SEQ ID NO: 486 - DNA, 1338 bp, Homo Sapiens
atgagggaaatcgtgcacttgcaggccgggcagtgcggcaaccaaatcggcgccaagttttgggaggtgatcagcgatgagcacggcatcgaccccacgggcacctaccacggggacagcgacctgcagctggaacgcatcaacgtgtactacaatgaggccaccggcggcaagtacgtgccccgcgccgtgctcgtggatctggagcccggcaccatggactccgtgcgctcggggcccttcgggcagatcttccggccggacaacttcgttttcggtcagagtggtgctgggaacaactgggccaaggggcactacacagaaggcgcggagctggtggactcggtgctggatgttgtgagaaaggaggctgagagctgtgactgcctgcagggtttccagctgacccactccctgggtggggggactgggtctgggatgggtaccctcctcatcagcaagatccgggaggagtacccagacaggatcatgaacacgtttagtgtggtgccttcgcccaaagtgtcagacacagtggtggagccctacaacgccaccctctcagtccaccagctcgtagaaaacacagacgagacctactgcattgataacgaagctctctacgacatttgcttcagaaccctaaagctgaccacgcccacctatggtgacctgaaccacctggtgtctgctaccatgagtggggtcaccacctgcctgcgcttcccaggccagctcaatgctgacctgcggaagctggctgtgaacatggtcccgtttccccggctgcacttcttcatgcccggctttgccccactgaccagccggggcagccagcagtaccgggcgctgaccgtgcccgagctcacccagcagatgtttgatgccaagaacatgatggctgcctgcgacccccgccatggccgctacctgacggttgccgccgtgttcaggggccgcatgtccatgaaggaggtggatgagcaaatgcttaatgtccaaaacaaaaacagcagctattttgttgagtggatccccaacaatgtgaaaacggctgtctgtgacatcccacctcgggggctaaaaatgtccgccaccttcattggcaacagcacggccatccaggagctgttcaagcgcatctccgagcagttcacggccatgttccggcgcaaggccttcctgcactggtacacgggcgagggcatggacgagatggagttcaccgaggccgagagcaacatgaatgacctggtgtccgagtaccagcagtaccaggatgccacagccgaggaggagggcgagttcgaggaggaggctgaggaggaggtggcctag

SEQ ID NO: 487 - DNA, 3015 bp, Homo Sapiens
atgtgggagaaaatggagaccaagacgatcgtgtacgacttggacacatcaggggggctgatggagcaaatccaagctctgctggctccccccaagacggacgaggcagaaaagcgcagtcggaagcctgagaaggagccccggagaagcggcagggccaccaaccacgacagctgcgatagctgcaaggaaggtggagatctcctgtgctgcgaccactgcccggctgccttccacctccagtgctgtaaccctccactgagtgaagaaatgttgcctcctggagagtggatgtgtcaccggtgcactgttcgccgaaagaaacgagagcagaaaaaggagctgggtcatgtcaatggactggtggacaaatctggcaaacggactacatcccccagcagtgacactgacttgttggacagatcggccagcaaaactgaactaaaggccattgcccatgcccggatcctggaaaggagagccagcaggcctggcacacccacatccagcgccagcacagagactcccacctctgagcagaatgatgtcgacgaagacatcattgacgtggatgaggaaccagtagcagcggagccagactatgtgcagccccagctgaggcggccctttgagctgctgattgctgccgccatggagcggaaccccacccaatttcagttgcccaatgaactgacttgtaccactgcactaccaggttctagcaagaggagaagaaaggaggaaaccacagggaaaaatgttaagaagacacagcatgaattagatcacaatggtctcgttcccttacccgtcaaagtctgcttcacgtgtaacaggagttgccgtgtggctcctctcatccagtgtgactattgccctctcctgtttcacatggattgcctcgagccgccgctcactgccatgcccctgggcagatggatgtgtccgaatcacatcgaacatgtggtgctgaaccagaagaatatgacactgagcaatcggtgccaggtgtttgatcgtttccaggacaccgtttcgcagcatgtcgtcaaagtggacttcctgaaccgaatccacaagaagcacccccctaaccggcgtgtgctccagtcggtcaaaagaagaagcttgaaggttcctgatgctataaaatctcagtaccagtttccaccccctctcattgcacccgcggccattcgggacggggagctgatctgcaatgggatccctgaggaatcacagatgcaccttttgaactctgagcacttagccacccaagcagagcagcaagagtggctctgtagtgttgttgcgctccagtgcagcatattgaaacatttatctgctaagcagatgccttcgcattgggactctgaacagacagagaaggctgatattaagcctgttattgtgactgacagctcagtcaccacctccctgcaaacagctgacaagacacctacaccttcccactaccccttgtcctgcccctcagggattagcacccagaattccctgagctgctctccaccccaccagtccccagccctagaggacatcggctgcagttcttgtgcggaaaaatccaagaaaaccccttgtgggactgccaatgggccagtgaacacagaggtgaaagctaatggcccacacctctacagcagccctactgattccacggacccccggcgacttccaggcgctaacaccccactaccaggcctctcacaccggcaaggctggccccggcccctcacgccaccagcggctgggggccttcagaaccacaccgtcggcatcattgtgaagacagagaatgccactggccccagctcttgcccccagaggagtttggttcctgtcccaagcctgcccccttccattcccagctcttgtgccagcatcgagaacaccagcactttgcaaagaaagactgtccaatcacagataggacctccgttgacagattcaaggccactgggctcacccccaaacgccacccgggtgctcactcccccgcaagcagcaggagatggtatcttggccacaacagccaaccaacgattcagctcaccagcgccatcgtcagatggcaaggtcagccccggcacgttatccataggaagcgctttaaccgtaccctctttcccagccaactctactgccatggtggacctcaccaactcacttcgagcatttatggatgtcaatggagaaatcgagataaatatgctggacgagaagctgatcaagtttctggccttgcagagaatacatcagcttttcccctcccgggtccaaccttcaccgggcagtgtcgggacacatcagctggcttctggagggcaccacatagaagtgcaaagaaaggaggtacaggcccgagctgtgttctaccccctcttagggttgggaggagctgtgaacatgtgctatcgaaccctctacatcgggacaggagctgacatggatgtgtgccttacaaactatggtcactgtaactacgtgtccgggaaacatgcctgcatattctacgatgagaataccaaacattatgagctgttaaactacagtgagcatgggacaacggtggacaatgtgctgtattcatgtgacttctcggagaagaccccgccaacccccccaagcagtattgttgccaaagtgcagagtgtcatcaggcgccgccggcaccagaaacaggacgaagagccaagtgaggaggcagccatgatgagttcccaggcccaggggccgcagcggagaccctgcaattgcaaagccagcagctcgagcttgattgggggcagtggggccggctgggagggcacagccttactgcaccatggcagctacatcaagctgggctgcctgcagtttgtcttcagcatcactgagtttgcgaccaaacagcccaaaggcgatgccagcctgctgcaggatggggtcttggccgagaagctctctctcaagccccaccagggccctgtgctgcgctccaactctgttccttag

SEQ ID NO: 488 - DNA, 2355 bp, Homo Sapiens
atggacgcggacgactcccgggcccccaagggctccttgcggaagttcctggagcacctctccggggccggcaaggccatcggcgtgctgaccagcggcggggatgctcaaggtatgaacgctgccgtccgtgccgtggtgcgcatgggtatctacgtgggggccaaggtgtacttcatctacgagggctaccagggcatggtggacggaggctcaaacatcgcagaggccgactgggagagtgtctccagcatcctgcaagtgggcgggacgatcattggcagtgcgcggtgccaggccttccgcacgcgggaaggccgcctgaaggctgcttgcaacctgctgcagcgcggcatcaccaacctgtgtgtgatcggcggggacgggagcctcaccggggccaacctcttccggaaggagtggagtgggctgctggaggagctggccaggaacggccagatcgataaggaggccgtgcagaagtacgcctacctcaacgtggtgggcatggtgggctccatcgacaatgatttctgcggcaccgacatgaccatcggcacggactccgccctgcacaggatcatcgaggtcgtcgacgccatcatgaccacggcccagagccaccagaggaccttcgttctggaggtgatgggacgacactgtgggtacctggccctggtgagtgccttggcctgcggtgcggactgggtgttccttccagaatctccaccagaggaaggctgggaggagcagatgtgtgtcaaactctcggagaaccgtgcccggaaaaaaaggctgaatattattattgtggctgaaggagcaattgatacccaaaataaacccatcacctctgagaaaatcaaagagcttgtcgtcacgcagctgggctatgacacacgtgtgaccatcctcgggcacgtgcagagaggagggaccccttcggcattcgacaggatcttggccagccgcatgggagtggaggcagtcatcgccttgctagaggccaccccggacaccccagcttgcgtcgtgtcactgaacgggaaccacgccgtgcgcctgccgctgatggagtgcgtgcagatgactcaggatgtgcagaaggcgatggacgagaggagatttcaagatgcggttcgactccgagggaggagctttgcgggcaacctgaacacctacaagcgacttgccatcaagctgccggatgatcagatcccaaagaccaattgcaacgtagctgtcatcaacgtgggggcacccgcggctgggatgaacgcagccgtacgctcagctgtgcgcgtgggcattgccgacggccacaggatgctcgccatctatgatggctttgacggcttcgccaagggccagatcaaagaaatcggctggacagatgtcgggggctggaccggccaaggaggctccattcttgggacaaaacgcgttctcccggggaagtacttggaagagatcgccacacagatgcgcacgcacagcatcaacgcgctgctgatcatcggtggattcgaggcctacctgggactcctggagctgtcagccgcccgggagaagcacgaggagttctgtgtccccatggtcatggttcccgctactgtgtccaacaatgtgccgggttccgatttcagcatcggggcagacaccgccctgaacactatcaccgacacctgcgaccgcatcaagcagtccgccagcggaaccaagcggcgcgtgttcatcatcgagaccatgggcggctactgtggctacctggccaacatgggggggctcgcggccggagctgatgccgcatacattttcgaagagcccttcgacatcagggatctgcagtccaacgtggagcacctgacggagaaaatgaagaccaccatccagagaggccttgtgctcagaaatgagagctgcagtgaaaactacaccaccgacttcatttaccagctgtattcagaagagggcaaaggcgtgtttgactgcaggaagaacgtgctgggtcacatgcagcagggtggggcaccctctccatttgatagaaactttggaaccaaaatctctgccagagctatggagtggatcactgcaaaactcaaggaggcccggggcagaggaaaaaaatttaccaccgatgattccatttgtgtgctgggaataagcaaaagaaacgttatttttcaacctgtggcagagctgaagaagcaaacggattttgagcacaggattcccaaagaacagtggtggctcaagctacggcccctcatgaaaatcctggccaagtacaaggccagctatgacgtgtcggactcaggccagctggaacatgtgcagccctggagtgtctga

SEQ ID NO: 489 - DNA, 750 bp, Homo Sapiens
atggcatcgaggagaatggagaccaaacctgtgataacctgtctcaaaaccctcctcatcatctactccttcgtcttctggatcactggggtgatcctgctggctgttggagtctggggcaaacttactctgggcacctatatctcccttattgccgagaactccacaaatgctccctatgtgctcatcggaactggcaccactattgttgtctttggcctgtttggatgctttgctacatgtcgtggtagcccatggatgctgaaactgtatgccatgtttctgtccctggtgttcctggctgagctcgtagctggcatttcagggtttgtgtttcgtcatgagatcaaggacaccttcctgaggacttacacggacgctatgcagacttacaatggcaatgatgagaggagccgggcagtggaccatgtgcagcgcagcctgagctgctgtggtgtgcagaactacaccaactggagcaccagcccctacttcctggagcatggcatcccccccagctgctgcatgaacgaaactgattgtaatccccaggatctacacaatctgactgtggccgccaccaaagttaaccagaagggttgttatgatctggtaactagtttcatggagactaacatgggaatcatcgctggagtggcgtttggaatcgcattctcccagttaattggcatgctgctggcctgctgtctgtcccggttcatcacggccaatcagtatgagatggtgtaa

SEQ ID NO: 490 - DNA, 2133 bp, Homo Sapiens
atgtctgttccatcatcactgagccagtcggccattaatgccaacagccacggaggccccgcactgagcctacccctgcctctgcacgctgcccacaaccagctgctcaacgccaagctgcaggccacagctgtgggacccaaggacctgcgcagcgccatgggggagggtggtgggcctgagccaggccctgccaatgccaagtggctaaaagagggccagaaccagctccggcgggccgccacggcccaccgtgaccagaatcgcaatgtgaccttgaccttggcggaggaggccagccaggagcctgagatggcacccttgggccccaaaggcctgatacacctgtactctgagctggagctctcagctcacaacgcagccaaccgaggcctacgaggacctggcctgatcatcagcactcaagagcaggggccagatgagggagaggagaaggcggccggggaggccgaggaggaggaggaggatgatgatgatgaagaggaggaggaggacttatcttctcccccagggctgcctgagcccctggagagtgtggaggcccctcccaggccccaagcccttacagatggcccccgggaacacagcaagagtgccagcctcctgtttggcatgcggaacagtgcagccagtgatgaggactcaagctgggctaccttatcccagggcagcccctcctatggctccccagaggacacagattccttctggaaccccaacgccttcgagacggattccgacctgccggctggatggatgagggtccaggacacctcagggacctattactggcacatcccaacagggaccacccagtgggaaccccccggccgggcctccccctcacaggggagcagcccccaagaggagtcccagctcacctggacaggttttgctcatggagaaggctttgaggatggagaattttggaaggatgaacccagtgatgaggccccaatggagctgggactgaaggaacctgaggaggggacgttgaccttcccagctcagagcctcagcccagagccgttgccccaagaggaggagaagcttcccccacggaataccaacccagggatcaagtgtttcgccgtgcgctccctaggctgggtagagatgaccgaggaggagctggcccctggacgcagcagtgtggcagtcaacaattgcatccgtcagctctcttaccacaaaaacaacctgcatgaccccatgtctgggggctggggggaaggaaaggatctgctactgcagctggaggatgagacactaaagctagtggagccacagagccaggcactgctgcacgcccaacccatcatcagcatccgcgtgtggggcgtcgggcgggacagtggaagagagagggactttgcctacgtagctcgtgataagctgacccagatgctcaagtgccacgtgtttcgctgtgaggcacctgccaagaacatcgccaccagcctgcatgagatctgctctaagatcatggccgaacggcgtaatgcccgctgcttggtaaatggactctccctggaccactctaaacttgtggatgtccctttccaagtggaattcccagcgcctaagaatgagttggtccagaagttccaagtctattacctggggaatgtacctgttgctaaacctgttggggtagatgtgattaatggggccctcgagtcagtcctgtcctccagcagccgtgaacaatggaccccaagtcatgtcagtgtggcccctgctaccctcaccatcttgcaccagcagacagaggcagtgctgggagagtgtcgggtgcgtttcctctccttcctggccgtgggcagagatgtccacacgtttgcattcatcatggctgccggcccagcctccttctgctgccacatgttctggtgcgagcccaatgctgccagcctctcagaggctgtgcaggctgcgtgcatgcttcgctaccagaagtgtctggatgcccgttcccaggcctccacctcctgcctcccagcaccccctgctgagtctgtggcacggcgtgtagggtggactgtccgcaggggtgttcagtcgctgtggggctccctgaagcccaaacggctgggggcccataccccatga

SEQ ID NO: 491 - DNA, 783 bp, Homo Sapiens
atggcggggtcgccgctgctctgggggccgcgggccgggggcgtcggccttttggtgctgctgctgctcggcctgtttcggccgccccccgcgctctgcgcgcggccggtaaaggagccccgcggcctaagcgcagcgtctccgcccttggctgagactggcgctcctcgccgcttccggcggtcagtgccccgaggtgaggcggcgggggcggtgcaggagctggcgcgggcgctggcgcatctgctggaggccgaacgtcaggagcgggcgcgggccgaggcgcaggaggctgaggatcagcaggcgcgcgtcctggcgcagctgctgcgcgtctggggcgccccccgcaactctgatccggctctgggcctggacgacgaccccgacgcgcctgcagcgcagctcgctcgcgctctgctccgcgcccgccttgaccctgccgccctcgcagcccagcttgtccccgcgcccgtccccgccgcggcgctccgaccccggcccccggtctacgacgacggccccgcgggcccggatgctgaggaggcaggcgacgagacacccgacgtggaccccgagctgttgaggtacttgctgggacggattcttgcgggaagcgcggactccgagggggtggcagccccgcgccgcctccgccgtgccgccgaccacgatgtgggctctgagctgccccctgagggcgtgctgggggcgctgctgcgtgtgaaacgcctagagaccccggcgccccaggtgcctgcacgccgcctcttgccaccctga

SEQ ID NO: 492 - DNA, 2892 bp, Homo Sapiens
atggcggacctggccgagtgcaacatcaaagtgatgtgtcgcttcagacctctcaacgagtctgaagtgaaccgcggcgacaagtacatcgccaagtttcagggagaagacacggtcgtgatcgcgtccaagccttatgcatttgatcgggtgttccagtcaagcacatctcaagagcaagtgtataatgactgtgcaaagaagattgttaaagatgtacttgaaggatataatggaacaatatttgcatatggacaaacatcctctgggaagacacacacaatggagggtaaacttcatgatccagaaggcatgggaattattccaagaatagtgcaagatatttttaattatatttactccatggatgaaaatttggaatttcatattaaggtttcatattttgaaatatatttggataagataagggacctgttagatgtttcaaagaccaacctttcagttcatgaagacaaaaaccgagttccctatgtaaaggggtgcacagagcgttttgtatgtagtccagatgaagttatggataccatagatgaaggaaaatccaacagacatgtagcagttacaaatatgaatgaacatagctctaggagtcacagtatatttcttattaatgtcaaacaagagaacacacaaacggaacaaaagctgagtggaaaactttatctggttgatttagctggtagtgaaaaggttagtaaaactggagctgaaggtgctgtgctggatgaagctaaaaacatcaacaagtcactttctgctcttggaaatgttatttctgctttggctgagggtagtacatatgttccatatcgagatagtaaaatgacaagaatccttcaagattcattaggtggcaactgtagaaccactattgtaatttgctgctctccatcatcatacaatgagtctgaaacaaaatctacactcttatttggccaaagggccaaaacaattaagaacacagtttgtgtcaatgtggagttaactgcagaacagtggaaaaagaagtatgaaaaagaaaaagaaaaaaataagatcctgcggaacactattcagtggcttgaaaatgagctcaacagatggcgtaatggggagacggtgcctattgatgaacagtttgacaaagagaaagccaacttggaagctttcacagtggataaagatattactcttaccaatgataaaccagcaaccgcaattggagttataggaaattttactgatgctgaaagaagaaagtgtgaagaagaaattgctaaattatacaaacagcttgatgacaaggatgaagaaattaaccagcaaagtcaactggtagagaaactgaagacgcaaatgttggatcaggaggagcttttggcatctaccagaagggatcaagacaatatgcaagctgagctgaatcgccttcaagcagaaaatgatgcctctaaagaagaagtgaaagaagttttacaggccctagaagaacttgctgtcaattatgatcagaagtctcaggaagttgaagacaaaactaaggaatatgaattgcttagtgatgaattgaatcagaaatcggcaactttagcgagtatagatgctgagcttcagaaacttaaggaaatgaccaaccaccagaaaaaacgagcagctgagatgatggcatctttactaaaagaccttgcagaaataggaattgctgtgggaaataatgatgtaaagcagcctgagggaactggcatgatagatgaagagttcactgttgcaagactctacattagcaaaatgaagtcagaagtaaaaaccatggtgaaacgttgcaagcagttagaaagcacacaaactgagagcaacaaaaaaatggaagaaaatgaaaaggagttagcagcatgtcagcttcgtatctctcaacatgaagccaaaatcaagtcattgactgaataccttcaaaatgtggaacaaaagaaaagacagttggaggaatctgtcgatgccctcagtgaagaactagtccagcttcgagcacaagagaaagtccatgaaatggaaaaggagcacttaaataaggttcagactgcaaatgaagttaagcaagctgttgaacagcagatccagagccatagagaaactcatcaaaaacagatcagtagtttgagagatgaagtagaagcaaaagcaaaacttattactgatcttcaagaccaaaaccagaaaatgatgttagagcaggaacgtctaagagtagaacatgagaagttgaaagccacagatcaggaaaagagcagaaaactacatgaacttacggttatgcaagatagacgagaacaagcaagacaagacttgaagggtttggaagagacagtggcaaaagaacttcagactttacacaacctgcgcaaactctttgttcaggacctggctacaagagttaaaaagagtgctgagattgattctgatgacaccggaggcagcgctgctcagaagcaaaaaatctcctttcttgaaaataatcttgaacagctcactaaagtgcacaaacagttggtacgtgataatgcagatctccgctgtgaacttcctaagttggaaaagcgacttcgagctacagctgagagagtgaaagctttggaatcagcactgaaagaagctaaagaaaatgcatctcgtgatcgcaaacgctatcagcaagaagtagatcgcataaaggaagcagtcaggtcaaagaatatggccagaagagggcattctgcacagattgctaaacctattcgtcccgggcaacatccagcagcttctccaactcacccaagtgcaattcgtggaggaggtgcatttgttcagaacagccagccagtggcagtgcgaggtggaggaggcaaacaagtgtaa

SEQ ID NO: 493 - DNA, 429 bp, Homo Sapiens
atggccaccaagatcgacaaagaggcttgccgggcggcgtacaacctggtgcgcgacgacggctcggccgtcatctgggtgacttttaaatatgacggctccaccatcgtccccggcgagcagggagcggagtaccagcacttcatccagcagtgcacagatgacgtccggttgtttgccttcgtgcgcttcaccaccggggatgccatgagcaagaggtccaagtttgccctcatcacgtggatcggtgagaacgtcagcgggctgcagcgcgccaaaaccgggacggacaagaccctggtgaaggaggtcgtacagaatttcgctaaggagtttgtgatcagtgatcggaaggagctggaggaagatttcatcaagagcgagctgaagaaggcggggggagccaattacgacgcccagacggagtaa

SEQ ID NO: 494 - DNA, 1125 bp, Homo Sapiens
atgtcaagggttccaagtcctccacctccggcagaaatgtcgagtggccccgtagctgagagttggtgctacacacagatcaaggtagtgaaattctcctacatgtggaccatcaataactttagcttttgccgggaggaaatgggtgaagtcattaaaagttctacattttcatcaggagcaaatgataaactgaaatggtgtttgcgagtaaaccccaaagggttagatgaagaaagcaaagattacctgtcactttacctgttactggtcagctgtccaaagagtgaagttcgggcaaaattcaaattctccatcctgaatgccaagggagaagaaaccaaagctatggagagtcaacgggcatataggtttgtgcaaggcaaagactggggattcaagaaattcatccgtagagattttcttttggatgaggccaacgggcttctccctgatgacaagcttaccctcttctgcgaggtgagtgttgtgcaagattctgtcaacatttctggccagaataccatgaacatggtaaaggttcctgagtgccggctggcagatgagttaggaggactgtgggagaattcccggttcacagactgctgcttgtgtgttgccggccaggaattccaggctcacaaggctatcttagcagctcgttctccggtttttagtgccatgtttgaacatgaaatggaggagagcaaaaagaatcgagttgaaatcaatgatgtggagcctgaagtttttaaggaaatgatgtgcttcatttacacggggaaggctccaaacctcgacaaaatggctgatgatttgctggcagctgctgacaagtatgccctggagcgcttaaaggtcatgtgtgaggatgccctctgcagtaacctgtccgtggagaacgctgcagaaattctcatcctggccgacctccacagtgcagatcagttgaaaactcaggcagtggatttcatcaactatcatgcttcggatgtcttggagacctctgggtggaagtcaatggtggtgtcacatccccacttggtggctgaggcataccgctctctggcttcagcacagtgcccttttctgggacccccacgcaaacgcctgaagcaatcctaa

SEQ ID NO: 495 - DNA, 846 bp, Homo Sapiens
atgaaactggccgcgatgatcaagaagatgtgcccgagcgactcggagctgagtatcccggccaagaactgctatcgcatggtcatcctcggctcgtccaaggtgggcaagacggccatcgtgtcgcgcttcctcaccggccgcttcgaggacgcctacacgcctaccatcgaggacttccaccgcaagttctactccatccgcggcgaggtctaccagctcgacatcctcgacacgtccggcaaccacccgttccccgccatgcggcgcctctccatcctcacaggagacgttttcatcctggtgttcagtctggacaaccgcgactccttcgaggaggtgcagcggctcaggcagcagatcctcgacaccaagtcttgcctcaagaacaaaaccaaggagaacgtggacgtgcccctggtcatctgcggcaacaagggtgaccgcgacttctaccgcgaggtggaccagcgcgagatcgagcagctggtgggcgacgacccccagcgctgcgcctacttcgagatctcggccaagaagaacagcagcctggaccagatgttccgcgcgctcttcgccatggccaagctgcccagcgagatgagcccagacctgcaccgcaaggtctcggtgcagtactgcgacgtgctgcacaagaaggcgctgcggaacaagaagctgctgcgggccggcagcggcggcggcggcggcgacccgggcgacgcctttggcatcgtggcacccttcgcgcgccggcccagcgtacacagcgacctcatgtacatccgcgagaaggccagcgccggcagccaggccaaggacaaggagcgctgcgtcatcagctag

SEQ ID NO: 496 - DNA, 2568 bp, Homo Sapiens
atggcagtggaggacagcacgctgcaagtagtggtacgggtgcggccccccacccctcgggagctggacagtcagcggcggccagtggttcaggtggtggacgagcgggtgctggtgtttaaccctgaggagcccgatggagggttccctggcctgaaatggggtggcacccatgatggccccaagaagaagggcaaagacctgacgtttgtctttgaccgggtctttggcgaggcggccacccaacaggacgtgttccagcacaccacgcacagcgtcctggacagcttcctccagggctacaactgctcagtgtttgcctacggggccaccggggctgggaagacacacaccatgctgggaagggagggggaccccggcatcatgtacctgaccaccgtggaactgtacaggcgcctggaggcccgccagcaggagaagcacttcgaggtgctcatcagctaccaggaggtgtataatgaacagatccatgacctcctggagcccaaggggccccttgccatccgcgaggaccccgacaagggggtggtggtgcaaggactttctttccaccagccagcctcagccgagcagctgctggagatactgaccagggggaaccgtaaccgcacgcagcaccccactgatgccaacgcgacttcctcccgctcccatgccatcttccagatctttgtgaagcagcaggaccgggttccaggactgacccaggctgtccaggtggccaagatgagcctgattgacctggctggctcagagcgggcatccagcacccatgcgaagggggagcggctgcgggagggggccaacatcaaccgctctctgctggcgctcatcaacgtcctcaatgccttggccgatgcaaagggccgcaagacccatgtgccctaccgggacagcaaactgacccgcctgctcaaagactccctcgggggcaactgccgcacagtgatgatcgctgccatcagcccctccagcctgacctacgaggacacgtacaacaccctcaaatatgccgaccgggccaaggagatcaggctctcgctgaagagcaatgtgaccagcctggactgtcacatcagccagtatgctaccatctgccaacagctccaggctgaggtagccgctctgaggaagaagctccaagtgtatgaggggggaggccagcccccaccacaggacctcccaggatctcccaagtcgggaccaccaccagaacaccttcccagctcccccttgccaccccaccctcccagccagccctgcaccccagagctccctgcagggcctagagcccttcaagaggagagtctggggatggaggcccaggtggagagggccatggaagggaactcttcagaccaggagcagtccccagaggatgaggatgaaggcccagctgaggaggttccaacccagatgccagagcagaaccccacacatgcactgccagagtcccctcgcctgaccctgcagcccaagccagtcgtgggccacttctcagcacgggaactggatggggaccgttctaagcagttggccctaaaggtgctgtgcgttgcccagcggcagtactccctgctccaagcagccaacctcctgacgcccgacatgatcacagagtttgagaccctacagcagctggtgcaagaggaaaaaattgagcctggggcagaggccttgaggacttcaggcctggccaggggggcacctctggctcaggagctgtgttcagagtcaaagcctccaggatacactggccctgtgacccggactatggcgaggcgactgagtggccccctgcacaccctgggaatcccgcctggacccaactgcaccccagcccaggggtcccgatggcccatggagaagaagaggaggagaccaagcgccttggaggcagacagtcccatggccccaaagcggggcaccaagcgccagcgccagtccttcctgccctgcctaaggagagggtctctgcctgacacccaaccttcacaggggcccagcacccccaaaggagaaagggcctcctccccctgccattcccctcgcgtttgcccagccacagtcatcaaaagccgggtgcccctgggcccttccgccatgcagaactgctccaccccgctggctctgcccactcgagacctcaatgccacctttgatctctctgaggagcctccctcaaagcccagtttccatgaatgcattggctgggacaaaataccccaggagctgagcaggctggaccagcccttcatccccagggcacctgtgcccctgttcaccatgaagggccccaagccaacatcttccctccctgggacctctgcctgcaagaagaagcgcgttgcgagttcctcagtctcccatggccgcagccgcatcgcccgcctccccagcagcactttgaagaggccagctgggccccttgtactcccagagctgcccttgagtcccctgtgccctagcaaccggaggaatggaaaggacctcatcagggtggggagagcactctcagcagggaacggcgtcaccaaggtgtcctga

SEQ ID NO: 497 - DNA, 2916 bp, Homo Sapiens
atgctgcgccgccccgctcccgcgctggccccggccgcccggctgctgctggccgggctgctgtgcggcggcggggtctgggccgcgcgagttaacaagcacaagccctggctggagcccacctaccacggcatagtcacagagaacgacaacaccgtgctcctcgaccccccactgatcgcgctggataaagatgcgcctctgcgatttgcaggtgagatttgtggatttaaaattcacgggcagaatgtcccctttgatgcagtggtagtggataaatccactggtgagggagtcattcgctccaaagagaaactggactgtgagctgcagaaagactattcattcaccatccaggcctatgattgtgggaagggacctgatggcaccaacgtgaaaaagtctcataaagcaactgttcatattcaggtgaacgacgtgaatgagtacgcgcccgtgttcaaggagaagtcctacaaagccacggtcatcgaggggaagcagtacgacagcattttgagggtggaggccgtggatgccgactgctcccctcagttcagccagatttgcagctacgaaatcatcactccagacgtgccctttactgttgacaaagatggttatataaaaaacacagagaaattaaactacgggaaagaacatcaatataagctgaccgtcactgcctatgactgtgggaagaaaagagccacagaagatgttttggtgaagatcagcattaagcccacctgcacccctgggtggcaaggatggaacaacaggattgagtatgagccgggcaccggcgcgttggccgtctttccaaatatccacctggagacatgtgacgagccagtcgcctcagtacaggccacagtggagctagaaaccagccacatagggaaaggctgcgaccgagacacctactcagagaagtccctccaccggctctgtggtgcggccgcgggcactgccgagctgctgccatccccgagtggatccctcaactggaccatgggcctgcccaccgacaatggccacgacagcgaccaggtgtttgagttcaacggcacccaggcagtgaggatcccggatggcgtcgtgtcggtcagccccaaagagccgttcaccatctcggtgtggatgagacatgggccattcggcaggaagaaggagacaattctttgcagttctgataaaacagatatgaatcggcaccactactccctctatgtccacgggtgccggctgatcttcctcttccgtcaggatccttctgaggagaagaaatacagacctgcagagttccactggaagttgaatcaggtctgtgatgaggaatggcaccactacgtcctcaatgtagaattcccgagtgtgactctctatgtggatggcacgtcccacgagcccttctctgtgactgaggattacccgctccatccatccaagatagaaactcagctcgtggtgggggcttgctggcaagagttttcaggagttgaaaatgacaatgaaactgagcctgtgactgtggcctctgcaggtggcgacctgcacatgacccagtttttccgaggcaatctggctggcttaactctccgttccgggaaactcgcggataagaaggtgatcgactgtctgtatacctgcaaggaggggctggacctgcaggtcctcgaagacagtggcagaggcgtgcagatccaagcacaccccagccagttggtattgaccttggagggagaagacctcggggaattggataaggccatgcagcacatctcgtacctgaactcccggcagttccccacgcccggaattcgcagactcaaaatcaccagcacaatcaagtgttttaacgaggccacctgcatttcggtccccccggtagatggctacgtgatggttttacagcccgaggagcccaagatcagcctgagtggcgtccaccattttgcccgagcagcttctgaatttgaaagctcagaaggggtgttccttttccctgagcttcgcatcatcagcaccatcacgagagaagtggagcctgaaggggacggggctgaggaccccacagttcaagaatcactggtgtccgaggagatcgtgcacgacctggatacctgtgaggtcacggtggagggagaggagctgaaccacgagcaggagagcctggaggtggacatggcccgcctgcagcagaagggcattgaagtgagcagctctgaactgggcatgaccttcacaggcgtggacaccatggccagctacgaggaggttttgcacctgctgcgctatcggaactggcatgccaggtccttgcttgaccggaagtttaagctcatctgctcagagctgaatggccgctacatcagcaacgaatttaaggtggaggtgaatgtaatccacacggccaaccccatggaacacgccaaccacatggctgcccagccacagttcgtgcacccggaacaccgctcctttgttgacctgtcaggccacaacctggccaacccccacccgttcgcagtcgtccccagcactgcgacagttgtgatcgtggtgtgcgtcagcttcctggtgttcatgattatcctgggggtatttcggatccgggccgcacatcggcggaccatgcgggatcaggacaccgggaaggagaacgagatggactgggacgactctgccctgaccatcaccgtcaaccccatggagacctatgaggaccagcacagcagtgaggaggaggaggaagaggaagaggaagaggaaagcgaggacggcgaagaagaggatgacatcaccagcgccgagtcggagagcagcgaggaggaggagggggagcagggcgacccccagaacgcaacccggcagcagcagctggagtgggatgactccaccctcagctactga

SEQ ID NO: 498 - DNA, 504 bp, Homo Sapiens
atggcggcctccgtgtgcagcgggttgctggggccacgggtgctgtcctggagccgagagctgccttgcgcttggcgcgccctgcacacctccccggtctgcgccaagaaccgggcggcccgagtacgcgtaagcaagggggacaagccggtgacctacgaggaggcacacgcgccgcactacatcgcccaccgtaaaggctggctgtcgctgcacacaggtaacctggatggagaggaccatgccgcagagcgaacggtggaggatgttttccttcgcaagttcatgtggggtaccttcccaggctgcctggctgaccagctggttttaaagcgccggggtaaccagttggagatctgtgccgtggtcctgaggcagttgtctccacacaagtactacttcctcgtgggctacagtgaaactttgctgtcctacttttacaaatgtcctgtgcgactccacctccaaactgtgccctcaaaggttgtgtataagtacctctag

SEQ ID NO: 499 - DNA, 750 bp, Homo Sapiens
atggctgcggggatgtatttggaacattatctggacagtattgaaaaccttccctttgaattacagagaaactttcagctcatgagggacctagaccaaagaacagaggacctgaaggctgaaattgacaagttggccactgagtatatgagtagtgcccgcagcctgagctccgaggaaaaattggcccttctcaaacagatccaggaagcctatggcaagtgcaaggaatttggtgacgacaaggtgcagcttgccatgcagacctatgagatggtggacaaacacattcggcggctggacacagacctggcccgttttgaggctgatctcaaggagaaacagattgagtcaagtgactatgacagctcttccagcaaaggcaaaaagaaaggccggactcaaaaggagaagaaagctgctcgtgctcgttccaaagggaaaaactcggatgaagaagcccccaagactgcccagaagaagttaaagctcgtgcgcacaagtcctgagtatgggatgccctcagtgacctttggcagtgtccacccctctgatgtgttggatatgcctgtggatcccaacgaacccacctattgcctttgtcaccaggtctcctatggagagatgattggctgtgacaaccctgattgttccattgagtggttccattttgcctgtgtggggctgacaaccaagcctcgggggaaatggttttgcccacgctgctcccaagaacggaagaagaaatag

SEQ ID NO: 500 - DNA, 1380 bp, Homo Sapiens
atggcaagctcggcttccctggagaccatggtgcccccggcctgcccgcgcgccggagcgtcgccggccacttccaagacactggccttttccatcgagcgcatcatggccaagacgtcggagccccgtgcgccctttgagccccggcctggagcgctagaggcggacggcagccagggcaagaaactgctcaacctctgctcgccgctgccctgtatgatccccctccagcccctaggctacgaggtgccgtcaaagacactgctcagttactcggagctctggaaaagcagcctccgggcgggcggcggcggaggcggcggcggcggtggcggcggcggcggcgggggggccccagtgtgcggcgccagcggcttgtgcaaaaccaactgtggcgtgtgctgcaaggccgagctgggcctggcgccgtccgcgctgcccgcgggcagggtcatcaagccgcaggtcatcaaccaggctgtggggctgccggccagcggctcgctctactacttcaactacctggactcgaccgcgtacccgccgtctgagctcctcagcggccacctcttcccgtctggcctcctcaatgcgcaggcccccgccgccctggctgctcaccccaagctctttctgctggagaacgccaagctggccggcctggctgcggacaagttcccccacccggctccctatccccataaggagcgcttgccggcgccgctggagcaggtactgaaggaaaactcggccctgactgccgagcgcggaggcgtcaagggccacagcaagctgccaggaggctccgcagatggcaagcccaaaaacttcacctgcgaggtgtgcggcaaggtgtttaacgctcactataatctcacccgccacatgccggtccacaccggagccagaccgttcgtgtgcaaagtctgcggcaaaggctttcgccaggccagcacgctctgcaggcacaaaattatccacacccaggaaaagccacataaatgcaaccagtgcggcaaagcgttcaaccgcagctccacgctcaacacgcatatccgcatccacgcgggctacaagcccttcgtctgcgaattttgcggcaaaggctttcaccaaaaagggaactacaagaaccacaagctgacccacagcggcgagaagcagtacaaatgtaccatctgcaacaaggccttccaccaggtctacaacctaaccttccatatgcacacccacaacgacaagaagcctttcacgtgcgccacttgcggcaaagggttttgcagaaactttgacttaaagaaacatgtgcgcaaactccacgacagcgtgggccctgctgccccctccgcaaaggacctgactaggacagtgcagagctga

SEQ ID NO: 501 - DNA, 255 bp, Homo Sapiens
atgaaggtgaagattaagtgctggaacggcgtggccacttggctctgggtggccaacgatgagaactgtggcatctgcaggatggcatttaacggatgctgccctgactgcaaggtgcccggcgacgactgcccgctggtgtggggccagtgctcccactgcttccacatgcattgcatcctcaagtggctgcacgcacagcaggtgcagcagcactgccccatgtgccgccaggaatggaagttcaaggagtga

SEQ ID NO: 502 - DNA, 1356 bp, Homo Sapiens
atgcgtgagtgcatctccatccacgttggccaggctggtgtccagattggcaatgcctgctgggagctctactgcctggaacacggcatccagcccgatggccagatgccaagtgacaagaccattgggggaggagatgactccttcaacaccttcttcagtgagacgggcgctggcaagcacgtgccccgggctgtgtttgtagacttggaacccacagtcattgatgaagttcgcactggcacctaccgccagctcttccaccctgagcagctcatcacaggcaaggaagatgctgccaataactatgcccgagggcactacaccattggcaaggagatcattgaccttgtgttggaccgaattcgcaagctggctgaccagtgcaccggtcttcagggcttcttggttttccacagctttggtgggggaactggttctgggttcacctccctgctcatggaacgtctctcagttgattatggcaagaagtccaagctggagttctccatttacccagcaccccaggtttccacagctgtagttgagccctacaactccatcctcaccacccacaccaccctggagcactctgattgtgccttcatggtagacaatgaggccatctatgacatctgtcgtagaaacctcgatatcgagcgcccaacctacactaaccttaaccgccttattagccagattgtgtcctccatcactgcttccctgagatttgatggagccctgaatgttgacctgacagaattccagaccaacctggtgccctacccccgcatccacttccctctggccacatatgcccctgtcatctctgctgagaaagcctaccatgaacagctttctgtagcagagatcaccaatgcttgctttgagccagccaaccagatggtgaaatgtgaccctcgccatggtaaatacatggcttgctgcctgttgtaccgtggtgacgtggttcccaaagatgtcaatgctgccattgccaccatcaaaaccaagcgcagcatccagtttgtggattggtgccccactggcttcaaggttggcatcaactaccagcctcccactgtggtgcctggtggagacctggccaaggtacagagagctgtgtgcatgctgagcaacaccacagccattgctgaggcctgggctcgcctggaccacaagtttgacctgatgtatgccaagcgtgcctttgttcactggtacgtgggtgaggggatggaggaaggcgagttttcagaggcccgtgaagatatggctgcccttgagaaggattatgaggaggttggtgtggattctgttgaaggagagggtgaggaagaaggagaggaatactaa

SEQ ID NO: 503 - DNA, 765 bp, Homo Sapiens
atggccgcctacaaactggtgctgatccggcacggcgagagcgcatggaacctggagaaccgcttcagcggctggtacgacgccgacctgagcccggcgggccacgaggaggcgaagcgcggcgggcaggcgctacgagatgctggctatgagtttgacatctgcttcacctcagtgcagaagagagcgatccggaccctctggacagtgctagatgccattgatcagatgtggctgccagtggtgaggacttggcgcctcaatgagcggcactatgggggtctaaccggtctcaataaagcagaaactgctgcaaagcatggtgaggcccaggtgaagatctggaggcgctcctatgatgtcccaccacctccgatggagcccgaccatcctttctacagcaacatcagtaaggatcgcaggtatgcagacctcacagaagatcagctaccctcctgtgagagtctgaaggatactattgccagagctctgcccttctggaatgaagaaatagttccccagatcaaggaggggaaacgtgtactgattgcagcccatggcaacagcctccggggcattgtcaagcatctggagggtctctctgaagaggctatcatggagctgaacctgccgactggtattcccattgtctatgaattggacaagaacttgaagcctatcaagcccatgcagtttctgggggatgaagagacggtgcgcaaagccatggaagctgtggctgcccagggcaaggccaagaagtga

SEQ ID NO: 504 - DNA, 1066 bp, Homo Sapiens
cagccatcttgtctggagacaagtctgagaatgttcaagatttgctgctcttggatgtcactcctctttcccttggtattgaaactgctggtggagtcatgactgtcctcatcaagcgtaataccaccattcctaccaagcagacacagaccttcactacctattctgacaaccagcctggtgtgcttattcaggtttatgaaggcgagcgtgccatgacaaaggataacaacctgcttggcaagtttgaactcacaggcatacctcctgcaccccgaggtgttcctcagattgaagtcacttttgacattgatgccaatggtatcctcaatgtctctgctgtggacaagagtacgggaaaagagaacaagattactatcactaatgacaagggccgtttgagcaaggaagacattgaacgtatggtccaggaagctgagaagtacaaagctgaagatgagaagcagagggacaaggtgtcatccaagaattcacttgagtcctatgccttcaacatgaaagcaactgttgaagatgagaaacttcaaggcaagattaacgatgaggacaaacagaagattctggacaagtgtaatgaaattatcaactggcttgataagaatcagactgccgagaaggaagaatttgaacatcaacagaaagagctggagaaagtttgcaaccccatcatcaccaagctgtaccagagtgcaggaggcatgccaggaggaatgcctgggggatttcctggtggtggagctcctccctctggtggtgcttcctcagggcccaccattgaagaggttgattaagccaaccaagtgtagatgtagcattgttccacacatttaaaacatttgaaggacctaaattcgtagcaaattctgtggcagttttaaaaagttaagctgctatagtaagttactgggcattctcaatacttgaatatggaacatatgcacaggggaaggaaataacattgcactttataaacactgtattgtaagtggaaaatgcaatgtcttaaataaaactatttaaaattggcaccaaaaaaaaaaaaaaa

SEQ ID NO: 505 - DNA, 627 bp, Homo Sapiens
atggcgtcctctttgcttgcgggcgagcgattggtgcgtgctttgggccccggcggggagctggagccagagcggctaccccgaaagctgcgggccgagcttgaggccgcgctggggaagaagcacaagggcggtgatagctccagtggcccccaacgcttggtttctttccgtctcatccgggatctgcaccagcatctgagagaaagggattccaaactatacctccatgagctcctagaaggcagtgaaatctatctcccagaggttgtgaagcctccacggaacccagaactagttgcccggctggagaagattaagatacagctggccaatgaggaatataaacggatcacccgcaacgtcacttgtcaggatacaagacatggtgggactctcagcgacctgggaaagcaagtgagatcattgaaggctctggtcatcaccatcttcaatttcattgtcacggtggttgctgccttcgtctgcacttaccttggaagccaatatatcttcacagaaatggcctcgcgggtgctagctgcattgatcgtcgcctctgtggtgggtctggccgagctgtatgtcatggtgcgggcaatggaaggcgagctgggagaactgtaa

SEQ ID NO: 506 - DNA, 1161 bp, Homo Sapiens
atgttcccggagcccccaaccccggggcctccatcgcccgacacgcctcccgactccagtcgcatcagccacggcccagtgcccccctgggccctggccaccatcgtgctggtctcaggcctcctcatcttcagctgctgtttctgtctctaccggaagagctgtcggaggcggacaggcaagaagagccaggcccaagcccaggtccaccttcaggaagtgaaggggctgggccagagttacatagacaaggtgcagccagaagtagaggagctggagccagcaccatccgggccagggcagcaggtggcagacaagcatgagctaggacgactgcagtactccctggattatgacttccagagtggccagctgctggtgggcattctgcaagcaatgggattggcagccttggatcttggtggctcctcggacccctatgtgcgggtctacctgctgccggacaaacggaggcggtacgagaccaaggtgcatcggcagacgctgaaccctcactttggggagaccttcgccttcaaggtcccctacgtggagctggggggcagggtgctggtcatggcggtgtacgacttcgaccgcttctctcgcaatgacgccatcggggaggtgcgggtccctatgagctccgtggacctggggcggccagtgcaggcctggcgggagctgcaggcggctccgcgggaggagcaggagaagcttggggacatctgcttctccctccgctatgtccccacggccgggaagctcaccgtcatcgtcctggaggctaaaaacctgaagaagatggacgtaggaggactgtcagatccatacgtcaaggtccacctgctgcagggcggcaaaaaggtgcggaagaagaaaaccaccatcaagaagaacactctgaacccctattacaacgaagctttcagcttcgaggtgccctgtgaccaagtccagaaggtgcaggtggagctgaccgtgctggactacgacaagctgggcaagaacgaggccatcgggagggtggccgtgggggcggccgccggcggggctggcctgcggcactgggcggacatgctggccaacccgcggcggcccattgcccagtggcactcgctgcggcccccggaccgagtgaggctgctgcctgcgccctga

SEQ ID NO: 507 - DNA, 483 bp, Homo Sapiens
atgacgaacacaaagggaaagaggagaggcacccgatatatgttctctaggccttttagaaaacatggagttgttcctttggccacatatatgcgaatctataagaaaggtgatattgtagacatcaagggaatgggtactgttcaaaaaggaatgccccacaagtgttaccatggcaaaactggaagagtctacaatgttacccagcatgctgttggcattgttgtaaacaaacaagttaagggcaagattcttgccaagagaattaatgtgcgtattgagcacattaagcactctaagagccgagatagcttcctgaaacgtgtgaaggaaaatgatcagaaaaagaaagaagccaaagagaaaggtacctgggttcaactaaagcgccagcctgctccacccagagaagcacactttgtgagaaccaatgggaaggagcctgagctgctggaacctattccctatgaattcatggcataa

SEQ ID NO: 508 - DNA, 747 bp, Homo Sapiens
atggagggtgtagaagagaagaagaaggaggttcctgctgtgccagaaacccttaagaaaaagcgaaggaatttcgcagagctgaagatcaagcgcctgagaaagaagtttgcccaaaagatgcttcgaaaggcaaggaggaagcttatctatgaaaaagcaaagcactatcacaaggaatataggcagatgtacagaactgaaattcgaatggcgaggatggcaagaaaagctggcaacttctatgtacctgcagaacccaaattggcgtttgtcatcagaatcagaggtatcaatggagtgagcccaaaggttcgaaaggtgttgcagcttcttcgccttcgtcaaatcttcaatggaacctttgtgaagctcaacaaggcttcgattaacatgctgaggattgtagagccatatattgcatgggggtaccccaatctgaagtcagtaaatgaactaatctacaagcgtggttatggcaaaatcaataagaagcgaattgctttgacagataacgctttgattgctcgatctcttggtaaatacggcatcatctgcatggaggatttgattcatgagatctatactgttggaaaacgcttcaaagaggcaaataacttcctgtggcccttcaaattgtcttctccacgaggtggaatgaagaaaaagaccacccattttgtagaaggtggagatgctggcaacagggaggaccagatcaacaggcttattagaagaatgaactaa

SEQ ID NO: 509 - DNA, 660 bp, Homo Sapiens
atgaaccgactcttcgggaaagcgaaacccaaggctccgccgcccagcctgactgactgcattggcacggtggacagtagagcagaatccattgacaagaagatttctcgattggatgctgagctagtgaagtataaggatcagatcaagaagatgagagagggtcctgcaaagaatatggtcaagcagaaagccttgcgagttttaaagcaaaagaggatgtatgagcagcagcgggacaatcttgcccaacagtcattcaacatggaacaagccaattataccatccagtctttgaaggacaccaagaccacggttgatgctatgaaactgggagtaaaggaaatgaagaaggcatacaagcaagtgaagatcgaccagattgaggatttacaagaccagctagaggatatgatggaagatgcaaatgaaatccaagaagcactgagtcgcagttatggcaccccagaactggatgaagatgatttagaagcagagttggatgcactaggtgatgagcttctggctgatgaagacagttcttatttggatgaggcagcatctgcacctgcaattccagaaggtgttcccactgatacaaaaaacaaggatggagttctggtggatgaatttggattgccacagatccctgcttcatag

SEQ ID NO: 510 - DNA, 450 bp, Homo Sapiens
atggcttcttctgatatccaggtgaaagaactggagaagcgtgcctcaggccaggcttttgagctgattctcagccctcggtcaaaagaatctgttccagaattccccctttcccctccaaagaagaaggatctttccctggaggaaattcagaagaaattagaagctgcagaagaaagacgcaagtcccatgaagctgaggtcttgaagcagctggctgagaaacgagagcacgagaaagaagtgcttcagaaggcaatagaagagaacaacaacttcagtaaaatggcagaagagaaactgacccacaaaatggaagctaataaagagaaccgagaggcacaaatggctgccaaactggaacgtttgcgagagaaggataagcacattgaagaagtgcggaagaacaaagaatccaaagaccctgctgacgagactgaagctgactaa

SEQ ID NO: 511 - DNA, 894 bp, Homo Sapiens
atggggtttgttaaagttgttaagaataaggcctactttaagagataccaagtgaaatttagaagacgacgagagggtaaaactgattattatgctcggaaacgcttggtgatacaagataaaaataaatacaacacacccaaatacaggatgatagttcgtgtgacaaacagagatatcatttgtcagattgcttatgcccgtatagagggggatatgatagtctgcgcagcgtatgcacacgaactgccaaaatatggtgtgaaggttggcctgacaaattatgctgcagcatattgtactggcctgctgctggcccgcaggcttctcaataggtttggcatggacaagatctatgaaggccaagtggaggtgactggtgatgaatacaatgtggaaagcattgatggtcagccaggtgccttcacctgctatttggatgcaggccttgccagaactaccactggcaataaagtttttggtgccctgaagggagctgtggatggaggcttgtctatccctcacagtaccaaacgattccctggttatgattctgaaagcaaggaatttaatgcagaagtacatcggaagcacatcatgggccagaatgttgcagattacatgcgctacttaatggaagaagatgaagatgcttacaagaaacagttctctcaatacataaagaacagcgtaactccagacatgatggaggagatgtataagaaagctcatgctgctatacgagagaatccagtctatgaaaagaagcccaagaaagaagttaaaaagaagaggtggaaccgtcccaaaatgtcccttgctcagaagaaggatcgggtagctcaaaagaaggcaagcttcctcagagctcaggagcgggctgctgagagctaa

SEQ ID NO: 512 - DNA, 975 bp, Homo Sapiens
atgagcagcgaggccgagacccagcagccgcccgccgccccccccgccgcccccgccctcagcgccgccgacaccaagcccggcactacgggcagcggcgcagggagcggtggcccgggcggcctcacatcggcggcgcctgccggcggggacaagaaggtcatcgcaacgaaggttttgggaacagtaaaatggttcaatgtaaggaacggatatggtttcatcaacaggaatgacaccaaggaagatgtatttgtacaccagactgccataaagaagaataaccccaggaagtaccttcgcagtgtaggagatggagagactgtggagtttgatgttgttgaaggagaaaagggtgcggaggcagcaaatgttacaggtcctggtggtgttccagttcaaggcagtaaatatgcagcagaccgtaaccattatagacgctatccacgtcgtaggggtcctccacgcaattaccagcaaaattaccagaatagtgagagtggggaaaagaacgagggatcggagagtgctcccgaaggccaggcccaacaacgccggccctaccgcaggcgaaggttcccaccttactacatgcggagaccctatgggcgtcgaccacagtattccaaccctcctgtgcagggagaagtgatggagggtgctgacaaccagggtgcaggagaacaaggtagaccagtgaggcagaatatgtatcggggatatagaccacgattccgcaggggccctcctcgccaaagacagcctagagaggacggcaatgaagaagataaagaaaatcaaggagatgagacccaaggtcagcagccacctcaacgtcggtaccgccgcaacttcaattaccgacgcagacgcccagaaaaccctaaaccacaagatggcaaagagacaaaagcagccgatccaccagctgagaattcgtccgctcccgaggctgagcagggcggggctgagtaa

SEQ ID NO: 513 - DNA, 552 bp, Homo Sapiens
atgacgaccgcgtccacctcgcaggtgcgccagaactaccaccaggactcagaggccgccatcaaccgccagatcaacctggagctctacgcctcctacgtttacctgtccatgtcttactactttgaccgcgatgatgtggctttgaagaactttgccaaatactttcttcaccaatctcatgaggagagggaacatgctgagaaactgatgaagctgcagaaccaacgaggtggccgaatcttccttcaggatatcaagaaaccagactgtgatgactgggagagcgggctgaatgcaatggagtgtgcattacatttggaaaaaaatgtgaatcagtcactactggaactgcacaaactggccactgacaaaaatgacccccatttgtgtgacttcattgagacacattacctgaatgagcaggtgaaagccatcaaagaattgggtgaccacgtgaccaacttgcgcaagatgggagcgcccgaatctggcttggcggaatatctctttgacaagcacaccctgggagacagtgataatgaaagctaa

SEQ ID NO: 514 - DNA, 456 bp, Homo Sapiens
atgtgtgacttcaccgaagaccagaccgcagagttcaaggaggccttccagctgtttgaccgaacaggtgatggcaagatcctgtacagccagtgtggggatgtgatgagggccctgggccagaaccctaccaacgccgaggtgctcaaggtcctggggaaccccaagagtgatgagatgaatgtgaaggtgctggactttgagcactttctgcccatgctgcagacagtggccaagaacaaggaccagggcacctatgaggattatgtcgaaggacttcgggtgtttgacaaggaaggaaatggcaccgtcatgggtgctgaaatccggcatgttcttgtcacactgggtgagaagatgacagaggaagaagtagagatgctggtggcagggcatgaggacagcaatggttgtatcaactatgaagcgtttgtgaggcatatcctgtcggggtga

SEQ ID NO: 515 - DNA, 4626 bp, Homo Sapiens
atgtcgttccttgaagaggcgagggcagcggggcgcgcggtggtcctggcgttggtgctgctgctgctccccgccgtgcccgtgggcgccagcgttccgccgcggcccctgctcccgctgcagcccggcatgccccacgtgtgtgctgagcaggagctgaccctggtgggccgccgccagccgtgcgtgcaggccttaagccacacggtgccggtgtggaaggccggctgtgggtggcaggcgtggtgcgtgggtcatgagcggagaaccgtctactacatgggctacaggcaggtgtataccacggaggcccggaccgtgctcaggtgctgccgagggtggatgcagcagcccgacgaggagggctgcctctcggctgaatgcagcgccagcctctgttttcacggtggccgttgtgtgccaggctcagcccagccgtgtcactgtccccccggcttccagggaccccgctgtcagtatgatgtggacgaatgccgaacccacaacggtggctgccagcaccggtgcgtgaacaccccaggctcctacctctgtgagtgcaagcccggcttccggctccacactgacagcaggacctgcctggccattaactcctgcgccctgggcaatggcggctgccagcaccactgtgtccagctcacaatcactcggcatcgctgccagtgccggcccgggttccagctccaggaggacggcaggcattgtgtccgtagaagcccgtgtgccaacaggaacggcagctgcatgcacaggtgccaggtggtccggggcctcgcccgctgtgagtgccacgtgggctatcagctagcagcggacggcaaggcctgtgaagatgtggacgaatgtgccgcagggctggcccagtgtgcccatggctgcctcaacacccaggggtccttcaagtgcgtgtgtcacgcgggctatgagctgggcgccgatggccggcagtgctaccggattgagatggaaatcgtgaacagctgtgaggccaacaacggcggctgctcccatggctgcagccacaccagtgctgggcccctgtgcacatgtccccgcggctacgagctggacacagatcagaggacctgcatcgatgtcgacgactgtgcagacagcccgtgctgccagcaggtgtgcaccaacaaccctggcgggtacgagtgcggctgctacgccggctaccggctcagtgccgatggctgcggctgtgaggatgtggatgagtgcgcctccagccgtggcggctgcgagcaccactgcaccaacctggccggctccttccagtgctcctgcgaggccggctaccggctgcacgaggaccgtaggggctgcagccccctggaggagccgatggtggacctggacggcgagctgcctttcgtgcggcccctgccccacattgccgtgctccaggacgagctgccgcaactcttccaggatgacgacgtcggggccgatgaggaagaggcagagttgcggggcgaacacacgctcacagagaagtttgtctgcctggatgactcctttggccatgactgcagcttgacctgtgatgactgcaggaacggagggacctgcctcctgggcctggatggctgtgattgccccgagggctggactgggctcatctgcaatgagacttgtcctccggacacctttgggaagaactgcagcttctcctgcagctgtcagaatggtgggacctgcgactctgtcacgggggcctgccgctgccccccgggtgtcagtggaactaactgtgaggatggctgccccaagggctactatggcaagcactgtcgcaagaaatgcaactgtgccaaccggggccggtgccaccgcctctacggggcctgcctctgcgacccagggctctacggccgcttctgccacctcacctgcccgccgtgggcctttgggccgggctgctcggaggagtgccagtgtgtgcagccccacacgcagtcctgtgacaagagggatggcagctgctcctgcaaggctggcttccggggcgagcgctgtcaggcagagtgtgagctgggctactttgggccggggtgctggcaggcatgcacctgcccagtgggcgtggcctgtgactccgtgagcggcgagtgtgggaagcggtgtcctgctggcttccagggagaggactgtggccaagagtgcccggtggggacgtttggcgtgaactgctcgagctcctgctcctgtgggggggccccctgccacggggtcacggggcagtgccggtgtccgccggggaggactggggaagactgtgaggcagattgtcccgagggccgctgggggctgggctgccaggagatctgcccagcatgccagcacgctgcccgctgcgaccctgagaccggagcctgcctgtgcctccctggcttcgtcggcagccgctgccaggacgtgtgcccagcaggctggtatggtcccagctgccagacaaggtgctcttgtgccaatgatgggcactgccacccagccaccggacactgcagctgtgcccccgggtggaccggctttagctgccagagagcctgtgatactgggcactggggacctgactgcagccacccctgcaactgcagcgctggccacgggagctgtgatgccatcagcggcctgtgtctgtgtgaggctggctacgtgggcccgcggtgcgagcagcagtgtccccagggccactttgggcccggctgtgagcagcggtgccagtgtcagcatggagcagcctgtgaccacgtcagcggggcctgcacctgcccggccggctggaggggcaccttctgcgagcatgcctgcccggccggcttctttggattggactgtcgcagtgcctgcaactgcaccgccggagctgcctgtgatgccgtgaatggctcctgcctctgccccgctggccgccggggcccccgctgtgccgagacctgcccagcccacacctacgggcacaattgcagccaggcctgtgcctgctttaacggggcctcctgtgaccctgtccacgggcagtgccactgtgcccctggctggatggggccctcctgcctgcaggcctgccctgccggcctgtacggcgacaactgtcggcattcctgcctctgccagaacggagggacctgtgaccctgtctcaggccactgtgcgtgcccagagggctgggccggcctggcctgtgagaaggagtgcctcccccgggacgtcagagctggctgccggcacagcggcggttgcctcaacgggggcctgtgtgacccgcacacgggccgctgcctctgcccagccggctggactggggacaagtgtcagagcccctgcctgcggggctggtttggagaggcctgtgcccagcgctgcagctgcccgcctggcgctgcctgccaccacgtcactggggcctgccgctgtccccctggcttcactggctccggctgcgagcaggcctgcccacccggcagctttggggaggactgtgcgcagatgtgccagtgtcccggtgagaacccggcctgccaccctgccaccgggacctgctcatgtgctgctggctaccacggccccagctgccagcaacgatgtccgcccgggcggtatgggccaggctgtgaacagctgtgtgggtgtctcaacgggggctcctgtgatgcggccacgggggcctgccgctgccccactgggttcctcgggacggactgcaacctcacctgtccgcagggccgcttcggccccaactgcacccacgtgtgtgggtgtgggcagggggcggcctgcgaccctgtgaccggcacctgcctctgccccccggggagagccggcgtccgctgtgagcgaggctgcccccagaaccggtttggcgtgggctgcgagcacacctgctcctgcagaaatgggggcctgtgccacgccagcaacggcagctgctcctgtggcctgggctggacggggcggcactgcgagctggcctgtccccctgggcgctacggagccgcctgccatctggagtgctcctgccacaacaacagcacgtgtgagcctgccacgggcacctgccgctgcggccccggcttctatggccaggcctgcgagcacccctgtccccctggcttccacggggctggctgccaggggttgtgctggtgtcaacatggagccccctgcgaccccatcagtggccgatgcctctgccctgccggcttccacggccacttctgtgagagggggtgtgagccaggttcatttggagagggctgccaccagcgctgtgactgtgacgggggggcaccctgtgaccctgtcaccggtctctgcctttgcccaccagggcgctcaggagccacctgtaacctggattgcagaaggggccagtttgggcccagctgcaccctgcactgtgactgcgggggtggggctgactgcgaccctgtcagtgggcagtgtcactgtgtggatggctacatggggcccacgtgccgggaaggtgggcccctccggctccccgagaacccgtccttagcccagggctcagcgggcacactgcccgcctccagcagacccacatcccggagcggtggaccagcgaggcactag

SEQ ID NO: 516 - DNA, 6348 bp, Homo Sapiens
atgacactccacgccacccggggggctgcactcctctcttgggtgaacagtctacacgtggctgaccctgtggaggctgtgctgcagctccaggactgcagcatcttcatcaagatcattgacagaatccatggcactgaagagggacagcaaatcttgaagcagccggtgtcagagagactggactttgtgtgcagttttctgcagaaaaatcgaaaacatccctcttccccagaatgcctggtatctgcacagaaggtgctagagggatcagagctggaactggcgaagatgaccatgctgctcttataccactctaccatgagctccaaaagtcccagggactgggaacagtttgaatataaaattcaggctgagttggctgtcattcttaaatttgtgctggaccatgaggacgggctaaaccttaatgaggacctagagaacttcctacagaaagctcctgtgccttctacctgttctagcacattccctgaagagctctccccacctagccaccaggccaagagggagattcgcttcctagagctacagaaggttgcctcctcttccagtgggaacaactttctctcaggttctccagcttctcccatgggtgatatcctgcagaccccacagttccagatgagacggctgaagaagcagcttgctgatgagagaagtaatagggatgagctggagctggagctagctgagaaccgcaagctcctcaccgagaaggatgcacagatagccatgatgcagcagcgcattgaccgcctagccctgctgaatgagaagcaggcggccagcccactggagcccaaggagcttgaggagctgcgtgacaagaatgagagccttaccatgcggctgcatgaaaccctgaagcagtgccaggacctgaagacagagaagagccagatggatcgcaaaatcaaccagctttcggaggagaatggagacctttcctttaagctgcgggagtttgccagtcatctgcagcagctacaggatgccctcaatgagctgacggaggagcacagcaaggccactcaggagtggctagagaagcaggcccagctggagaaggagctcagcgcagccctgcaggacaagaaatgccttgaagagaagaacgaaatccttcagggaaaactttcacagctggaagaacacttgtcccagctgcaggataacccaccccaggagaagggcgaggtgctgggtgatgtcttgcagctggaaaccttgaagcaagaggcagccactcttgctgcaaacaacacacagctccaagccagggtagagatgctggagactgagcgaggccagcaggaagccaagctgcttgctgagcggggccacttcgaagaagaaaagcagcagctgtctagcctgatcactgacctgcagagctccatctccaacctcagccaggccaaggaagagctggagcaggcctcccaggctcatggggcccggttgactgcccaggtggcctctctgacctctgagctcaccacactcaatgccaccatccagcaacaggatcaagaactggctggcctgaagcagcaggccaaagagaagcaggcccagctagcacagaccctccaacagcaagaacaggcctcccagggcctccgccaccaggtggagcagctaagcagtagcctgaagcagaaggagcagcagttgaaggaggtagcggagaagcaggaggcaactaggcaggaccatgcccagcaactggccactgctgcagaggagcgagaggcctccttaagggagcgggatgcggctctcaagcagctggaggcactggagaaggagaaggctgccaagctggagattctgcagcagcaacttcaggtggctaatgaagcccgggacagtgcccagacctcagtgacacaggcccagcgggagaaggcagagctgagccggaaggtggaggaactccaggcctgtgttgagacagcccgccaggaacagcatgaggcccaggcccaggttgcagagctagagttgcagctgcggtctgagcagcaaaaagcaactgagaaagaaagggtggcccaggagaaggaccagctccaggagcagctccaggccctcaaagagtccttgaaggtcaccaagggcagccttgaagaggagaagcgcagggctgcagatgccctggaagagcagcagcgttgtatctctgagctgaaggcagagacccgaagcctggtggagcagcataagcgggaacgaaaggagctggaagaagagagggctgggcgcaaggggctggaggctcgattacagcagcttggggaggcccatcaggctgagactgaagtcctgcggcgggagctggcagaggccatggctgcccagcacacagctgagagtgagtgtgagcagctcgtcaaagaagtagctgcctggcgtgagcggtatgaggatagccagcaagaggaggcacagtatggcgccatgttccaggaacagctgatgactttgaaggaggaatgtgagaaggcccgccaggagctgcaggaggcaaaggagaaggtggcaggcatagaatcccacagcgagctccagataagccggcagcagaacgaactagctgagctccatgccaacctggccagagcactccagcaggtccaagagaaggaagtcagggcccagaagcttgcagatgacctctccactctgcaggaaaagatggctgccaccagcaaagaggtggcccgcttggagaccttggtgcgcaaggcaggtgagcagcaggaaacagcctcccgggagttagtcaaggagcctgcgagggcaggagacagacagcccgagtggctggaagagcaacagggacgccagttctgcagcacacaggcagcgctgcaggctatggagcgggaggcagagcagatgggcaatgagctggaacggctgcgggccgcgctgatggagagccaggggcagcagcaggaggagcgtgggcagcaggaaagggaggtggcgcggctgacccaggagcggggccgtgcccaggctgaccttgccctggagaaggcggccagagcagagcttgagatgcggctgcagaacgccctcaacgagcagcgtgtggagttcgctaccctgcaagaggcactggctcatgccctgacggaaaaggaaggcaaggaccaggagttggccaagcttcgtggtctggaggcagcccagataaaagagctggaggaacttcggcaaaccgtgaagcaactgaaggaacagctggctaagaaagaaaaggagcacgcatctggctcaggagcccaatctgaggctgctggcaggacagagccaacaggccccaagctggaggcactgcgggcagaggtgagcaagctggaacagcaatgccagaagcagcaggagcaggctgacagcctggaacgcagcctcgaggctgagcgggcctcccgggctgagcgggacagtgctctggagactctgcagggccagttagaggagaaggcccaggagctagggcacagtcagagtgccttagcctcggcccaacgggagttggctgccttccgcaccaaggtacaagaccacagcaaggctgaagatgagtggaaggcccaggtggcccggggccggcaagaggctgagaggaaaaatagcctcatcagcagcttggaggaggaggtgtccatcctgaatcgccaggtcctggagaaggagggggagagcaaggagttgaagcggctggtgatggccgagtcagagaagagccagaagctggaggagaggctgcgcctgctgcaggcagagacagccagcaacagtgccagagctgcagaacgcagctctgctctgcgggaggaggtgcagagcctccgggaggaggctgagaaacagcgggtggcttcagagaacctgcggcaggagctgacctcacaggctgagcgtgcggaggagctgggccaagaattgaaggcgtggcaggagaagttcttccagaaagagcaggccctctccaccctgcagctcgagcacaccagcacacaggccctggtgagtgagctgctgccagctaagcacctctgccagcagctgcaggccgagcaggccgctgccgagaaacgccaccgtgaggagctggagcagagcaagcaggccgctgggggactgcgggcagagctgctgcgggcccagcgggagcttggggagctgattcctctgcggcagaaggtggcagagcaggagcgaacagctcagcagctgcgggcagagaaggccagctatgcagagcagctgagcatgctgaagaaggcgcatggcctgctggcagaggagaaccgggggctgggtgagcgggccaaccttggccggcagtttctggaagtggagttggaccaggcccgggagaagtatgtccaagagttggcagccgtacgtgctgatgctgagacccgtctggctgaggtgcagcgagaagcacagagcactgcccgggagctggaggtgatgactgccaagtatgagggtgccaaggtcaaggtcctggaggagaggcagcggttccaggaagagaggcagaaactcactgcccaggtggagcagctagaggtatttcagagagagcaaactaagcaggtggaagaactgagtaagaaactggctgactctgaccaagccagcaaggtgcagcagcagaagctgaaggctgtccaggctcagggaggcgagagccagcaggaggcccagcgcctccaggcccagctgaatgaactgcaagcccagttgagccagaaggagcaggcagctgagcactataagctgcagatggagaaagccaaaacacattatgatgccaagaagcagcagaaccaagagctgcaggagcagctgcggagcctggagcagctgcagaaggaaaacaaagagctgcgagctgaagctgaacggctgggccatgagctacagcaggctgggctgaagaccaaggaggctgaacagacctgccgccaccttactgcccaggtgcgcagcctggaggcacaggttgcccatgcagaccagcagcttcgagacctgggcaaattccaggtggcaactgatgctttaaagagccgtgagccccaggctaagccccagctggacttgagtattgacagcctggatctgagctgcgaggaggggaccccactcagtatcaccagcaagctgcctcgtacccagccagacggcaccagcgtccctggagaaccagcctcacctatctcccagcgcctgccccccaaggtagaatccctggagagtctctacttcactcccatccctgctcggagtcaggcccccctggagagcagcctggactccctgggagacgtcttcctggactcgggtcgtaagacccgctccgctcgtcggcgcaccacgcagatcatcaacatcaccatgaccaagaagctagatgtggaagagccagacagcgccaactcatcgttctacagcacgcggtctgctcctgcttcccaggctagcctgcgagccacctcctctactcagtctctagctcgcctgggttctcccgattatggcaactcagccctgctcagcttgcctggctaccgccccaccactcgcagttctgctcgtcgttcccaggccggggtgtccagtggggcccctccaggaaggaacagcttctacatgggcacttgccaggatgagcctgagcagctggatgactggaaccgcattgcagagctgcagcagcgcaatcgagtgtgccccccacatctgaagacctgctatcccctggagtccaggccttccctgagcctgggcaccatcacagatgaggagatgaaaactggagacccccaagagaccctgcgccgagccagcatgcagccaatccagatagccgagggcactggcatcaccacccggcagcagcgcaaacgggtctccctagagccccaccagggccctggaactcctgagtctaagaaggccaccagctgtttcccacgccccatgactccccgagaccgacatgaagggcgcaaacagagcactactgaggcccagaagaaagcagctccagcttctactaaacaggctgaccggcgccagtcgatggccttcagcatcctcaacacacccaagaagctagggaacagccttctgcggcggggagcctcaaagaaggccctgtccaaggcttcccccaacactcgcagtggaacccgccgttctccgcgcattgccaccaccacagccagcgccgccactgctgccgccattggtgccacccctcgagccaagggcaaggcaaagcactaa

SEQ ID NO: 517 - DNA, 1183 bp, Homo Sapiens
atgtagccgcctgtcccgggagcctggactgtgccctgaagaggcgggcaaggtgtcctcctggtgcacatgcctgtgggccctgccttcagcccttccaggaggaccagcaagggctctgtgtgcccaggatgcgccggcctccaggcgggggccggccccagcccagactggaagatgagattgacttcctggcccaggagcttgcccggaaggagtctggacactcaactccgcccctacccaaggaccgacagcggctcccggagcctgccaccctgggcttctcggcacgggggcaggggctggagctgggcctcccctccactccaggaacccccacgcccacgccccacacctccctgggctcccctgtgtcatccgacccggtgcacatgtcgcccctggagccccggggagggcaaggcgacggcctcgcccttgtgctgatcctggcgttctgtgtggccggtgcagccgccctctccgtagcctccctctgctggtgcaggctgcagcgtgagatccgcctgactcagaaggccgactacgccactgcgaaggcccctggctcacctgcagctccccggatctcgcctggggaccagcggctggcacagagcgcggagatgtaccactaccagcaccaacggcaacagatgctgtgcctggagcggcataaagagccacccaaggagctggacacggcctcctcggatgaggagaatgaggacggagacttcacggtgtacgattgcccgggcctggccccgaccggggaaatggaggtgcgcaaccctctgttcgaccacgccgcactgtccgcgcccctgccggcccccagctcaccgcctgcactgccatgacctggaggcagacagacgcccacctgctccccgacctcaaggcccccggggaggggcagggcctggaacttcccactaaacatgttttgatgctgtgtgcttttggctgggcctcgggctccaggccctgggaccccttgccagagagacccccgaacctttgtgccaggacacctcctggtcccctgcacctctcctgttcggtttagacccccaaactggagggggcatggagaaccgtagagcgcaggaacgggtgggtaattttagagacaaaagccaattaaagtccatttcagacctgcggaaaaaaaaaa

SEQ ID NO: 518 - DNA, 897 bp, Homo Sapiens
atgacggaacaggccatctccttcgccaaagacttcttggccggaggcatcgccgccgccatctccaagacggccgtggctccgatcgagcgggtcaagctgctgctgcaggtccagcacgccagcaagcagatcgccgccgacaagcagtacaagggcatcgtggactgcattgtccgcatccccaaggagcagggcgtgctgtccttctggaggggcaaccttgccaacgtcattcgctacttccccactcaagccctcaacttcgccttcaaggataagtacaagcagatcttcctggggggcgtggacaagcacacgcagttctggaggtactttgcgggcaacctggcctccggcggtgcggccggcgcgacctccctctgcttcgtgtacccgctggatttcgccagaacccgcctggcagcggacgtgggaaagtcaggcacagagcgcgagttccgaggcctgggagactgcctggtgaagatcaccaagtccgacggcatccggggcctgtaccagggcttcagtgtctccgtgcagggcatcatcatctaccgggcggcctacttcggcgtgtacgatacggccaagggcatgctccccgaccccaagaacacgcacatcgtggtgagctggatgatcgcgcagaccgtgacggccgtggccggcgtggtgtcctaccccttcgacacggtgcggcggcgcatgatgatgcagtccgggcgcaaaggagctgacatcatgtacacgggcaccgtcgactgttggaggaagatcttcagagatgaggggggcaaggccttcttcaagggtgcgtggtccaacgtcctgcggggcatggggggcgccttcgtgctggtcctgtacgacgagctcaagaaggtgatctaa

SEQ ID NO: 519 - DNA, 627 bp, Homo Sapiens
atggacccgttcctggtgctgctgcactcggtgtcgtccagcctgtcgagcagcgagctgaccgagctcaagttcctatgcctcgggcgcgtgggcaagcgcaagctggagcgcgtgcagagcggcctagacctcttctccatgctgctggagcagaacgacctggagcccgggcacaccgagctcctgcgcgagctgctcgcctccctgcggcgccacgacctgctgcggcgcgtcgacgacttcgaggcgggggcggcggccggggccgcgcctggggaagaagacctgtgtgcagcatttaacgtcatatgtgataatgtggggaaagattggagaaggctggctcgtcagctcaaagtctcagacaccaagatcgacagcatcgaggacagatacccccgcaacctgacagagcgtgtgcgggagtcactgagaatctggaagaacacagagaaggagaacgcaacagtggcccacctggtgggggctctcaggtcctgccagatgaacctggtggctgacctggtacaagaggttcagcaggcccgtgacctccagaacaggagtggggccatgtccccgatgtcatggaactcagacgcatctacctccgaagcgtcctga

SEQ ID NO: 520 - DNA, 816 bp, Homo Sapiens
atggaggcggcggccgagcctggaaacctggccggcgtcaggcacatcatcctggtcctctcaggaaaggggggcgttgggaaaagcaccatctccacggagctggccctggcactgcgccatgcaggcaagaaggtgggaatcctggatgtggacctgtgtggccccagtatcccccgcatgctcggggcgcagggcagggctgtgcaccagtgcgaccgcggctgggcacccgtcttcctggaccgggagcagagcatctcgctcatgtctgtgggcttcctgctggagaagccggacgaggccgtggtgtggagaggccccaagaaaaacgcgctgataaagcagtttgtgtccgacgtggcctggggggagctggactacctggtggtggacacgcccccggggacctccgatgagcacatggccaccatagaagccctgcgtccctaccagcccctgggggccctcgtggtcaccacgccccaggcggtgtccgtgggggacgtgaggcgcgagctgaccttctgtaggaagacgggcttgcgggtgatgggaatcgtggagaatatgagcggcttcacctgcccacactgcacggagtgcaccagcgtcttctccaggggcggcggagaggagctggcccagctcgccggggtgcccttcttaggctccgtgcccctggaccctgcgctcatgaggaccctggaggagggccacgacttcatccaggagttccctgggagccccgccttcgctgcactcacctccatagcccagaagattctggacgcgacgcccgcgtgcctcccctga

SEQ ID NO: 521 - DNA, 657 bp, Homo Sapiens
atggggacccgggacgacgagtacgactacctattcaaagtggtgctcatcggggactcaggcgtgggcaagagcaacctgctgtcgcgcttcacccgcaacgagttcaacctggagagcaagagcaccatcggcgtggagttcgccacccgcagcatccaggtggacggcaagaccatcaaggcgcagatctgggacaccgctggccaggagcgctaccgcgccatcacctccgcgtactaccgtggtgcagtgggcgccctgctggtgtacgacatcgccaagcacctgacctatgagaacgtggagcgctggctgaaggagctgcgggaccacgcagacagcaacatcgtcatcatgctggtgggcaacaagagtgacctgcgccacctgcgggctgtgcccactgacgaggcccgcgccttcgcagaaaagaacaacttgtccttcatcgagacctcagccttggattccactaacgtagaggaagcattcaagaacatcctcacagagatctaccgcatcgtgtcacagaaacagatcgcagaccgcgctgcccacgacgagtccccggggaacaacgtggtggacatcagcgtgccgcccaccacggacggacagaagcccaacaagctgcagtgctgccagaacctgtga

SEQ ID NO: 522 - DNA, 888 bp, Homo Sapiens
atggacaattccgggaaggaagcggaggcgatggcgctgttggccgaggcggagcgcaaagtgaagaactcgcagtccttcttctctggcctctttggaggctcatccaaaatagaggaagcatgcgaaatctacgccagagcagcaaacatgttcaaaatggccaaaaactggagtgctgctggaaacgcgttctgccaggctgcacagctgcacctgcagctccagagcaagcacgacgcagccacctgctttgtggacgctggcaacgcattcaagaaagccgacccccaagaggccattaactgtttgatgcgagcaatcgagatctacacagacatgggccgattcacgattgcggccaagcaccacatctccattgctgagatctatgagacagagttggtggacatcgagaaggccattgcccactacgagcagtctgcagactactacaaaggcgaggagtccaacagctcagccaacaagtgtctgctgaaggtggctggttacgctgcgctgctggagcagtatcagaaggccattgacatctacgaacaggtggggaccaatgccatggacagccccctcctcaagtacagcgccaaagactacttcttcaaggcggccctctgccacttctgcatcgacatgctcaacgccaagctggctgtccaaaagtatgaggagctgttcccagctttctctgattcccgggaatgcaagttgatgaaaaaattgctagaggcccacgaggagcagaatgtggacagctacaccgagtcggtgaaggaatacgactccatctcccggctggaccagtggctcaccaccatgctgctgcgcatcaagaagaccatccagggcgatgaggaggacctgcgctaa

SEQ ID NO: 523 - DNA, 1338 bp, Homo Sapiens
atgcgcgagatcgtgcacatccaggcgggccagtgcggcaaccagatcggcgccaagttttgggaggtcatcagcgatgagcatgggatcgaccccacaggcagttaccatggagacagtgacttgcagctggagagaatcaacgtgtactacaatgaggctgctggtaacaaatatgtacctcgggccatcctggtggatctggagcctggcaccatggactctgtcaggtctggacccttcggccagatcttcagaccagacaacttcgtgttcggccagagtggagccgggaataactgggccaagggccactacacagagggagccgagctggtcgactcggtcctggatgtggtgaggaaggagtcagagagctgtgactgtctccagggcttccagctgacccactctctggggggcggcacggggtccgggatgggcaccctgctcatcagcaagatccgggaagagtacccagaccgcatcatgaacaccttcagcgtcatgccctcacccaaggtgtcagacacggtggtggagccctacaacgccaccctctctgtccaccagctggtggaaaacacagatgaaacctactccattgataacgaggccctgtatgacatctgcttccgcaccctgaagctgaccacccccacctacggggacctcaaccacctggtgtcggccaccatgagcggggtcaccacctgcctgcgcttcccgggccagctgaacgcagacctgcgcaagctggcggtgaacatggtgcccttccctcgcctgcacttcttcatgcccggcttcgcgcccctgaccagccggggcagccagcagtaccgggcgctcacggtgcccgagctcacccagcagatgttcgactccaagaacatgatggccgcctgcgacccgcgccacggccgctacctgacggtggctgccatcttccggggccgcatgtccatgaaggaggtggacgagcagatgctcaacgtgcagaacaagaacagcagctacttcgtggagtggatccccaacaacgtgaagacggccgtgtgcgacatcccgccccgcggcctgaagatgtcggccaccttcatcggcaacagcacggccatccaggagctgttcaagcgcatctccgagcagttcacggccatgttccggcgcaaggccttcctgcactggtacacgggcgagggcatggacgagatggagttcaccgaggccgagagcaacatgaacgacctggtgtccgagtaccagcagtaccaggacgccacggccgacgaacaaggggagttcgaggaggaggagggcgaggacgaggcttaa

SEQ ID NO: 524 - DNA, 2241 bp, Homo Sapiens
atgcaggccaaaaaacgctatttcatcctgctctcagctggctcttgtctcgcccttttgttttatttcggaggcttgcagtttagggcatcgaggagccacagccggagagaagaacacagcggtaggaatggcttgcaccaccccagtccggatcatttctggccccgcttcccggacgctctgcgccccttcgttccttgggatcaattggaaaacgaggattccagcgtgcacatttccccccggcagaagcgagatgccaactccagcatctacaaaggcaagaagtgccgcatggagtcctgcttcgatttcaccctttgcaagaaaaacggcttcaaagtctacgtatacccacagcaaaaaggggagaaaatcgccgaaagttaccaaaacattctagcggccatcgagggctccaggttctacacctcggaccccagccaggcgtgcctctttgtcctgagtctggatactttagacagagaccagttgtcacctcagtatgtgcacaatttgagatccaaagtgcagagtctccacttgtggaacaatggtaggaatcatttaatttttaatttatattccggcacttggcctgactacaccgaggacgtggggtttgacatcggccaggcgatgctggccaaagccagcatcagtactgaaaacttccgacccaactttgatgtttctattcccctcttttctaaggatcatcccaggacaggaggggagagggggtttttgaagttcaacaccatccctcctctcaggaagtacatgctggtattcaaggggaagaggtacctgacagggataggatcagacaccaggaatgccttatatcacgtccataacggggaggacgttgtgctcctcaccacctgcaagcatggcaaagactggcaaaagcacaaggattctcgctgtgacagagacaacaccgagtatgagaagtatgattatcgggaaatgctgcacaatgccactttctgtctggttcctcgtggtcgcaggcttgggtccttcagattcctggaggctttgcaggctgcctgcgtccctgtgatgctcagcaatggatgggagttgccattctctgaagtgattaattggaaccaagctgccgtcataggcgatgagagattgttattacagattccttctacaatcaggtctattcatcaggataaaatcctagcacttagacagcagacacaattcttgtgggaggcttatttttcttcagttgagaagattgtattaactacactagagattattcaggacagaatattcaagcacatatcacgtaacagtttaatatggaacaaacatcctggaggattgttcgtactaccacagtattcatcttatctgggagattttccttactactatgctaatttaggtttaaagcccccctccaaattcactgcagtcatccatgcggtgacccccctggtctctcagtcccagccagtgttgaagcttctcgtggctgcagccaagtcccagtactgtgcccagatcatagttctatggaattgtgacaagcccctaccagccaaacaccgctggcctgccactgctgtgcctgtcgtcgtcattgaaggagagagcaaggttatgagcagccgttttctgccctacgacaacatcatcacagacgccgtgctcagccttgacgaggacacggtgctttcaacaacagaggtggatttcgccttcacagtgtggcagagcttccctgagaggattgtggggtaccccgcgcgcagccacttctgggataactctaaggagcggtggggatacacatcaaagtggacgaacgactactccatggtgttgacaggagctgctatttaccacaaatattatcactacctatactcccattacctgccagccagcctgaagaacatggtggaccaattggccaattgtgaggacattctcatgaacttcctggtgtctgctgtgacaaaattgcctccaatcaaagtgacccagaagaagcagtataaggagacaatgatgggacagacttctcgggcttcccgttgggctgaccctgaccactttgcccagcgacagagctgcatgaatacgtttgccagctggtttggctacatgccgctgatccactctcagatgaggctcgaccccgtcctctttaaagaccaggtctctattttgaggaagaaataccgagacattgagcgactttga

SEQ ID NO: 525 - DNA, 1389 bp, Homo Sapiens
atgggaaaggaaaagactcatatcaacattgtcgtcattggacacgtagattcgggcaagtccaccactactggccatctgatctataaatgcggtggcatcgacaaaagaaccattgaaaaatttgagaaggaggctgctgagatgggaaagggctccttcaagtatgcctgggtcttggataaactgaaagctgagcgtgaacgtggtatcaccattgatatctccttgtggaaatttgagaccagcaagtactatgtgactatcattgatgccccaggacacagagactttatcaaaaacatgattacagggacatctcaggctgactgtgctgtcctgattgttgctgctggtgttggtgaatttgaagctggtatctccaagaatgggcagacccgagagcatgcccttctggcttacacactgggtgtgaaacaactaattgtcggtgttaacaaaatggattccactgagccaccctacagccagaagagatatgaggaaattgttaaggaagtcagcacttacattaagaaaattggctacaaccccgacacagtagcatttgtgccaatttctggttggaatggtgacaacatgctggagccaagtgctaacatgccttggttcaagggatggaaagtcacccgtaaggatggcaatgccagtggaaccacgctgcttgaggctctggactgcatcctaccaccaactcgtccaactgacaagcccttgcgcctgcctctccaggatgtctacaaaattggtggtattggtactgttcctgttggccgagtggagactggtgttctcaaacccggtatggtggtcacctttgctccagtcaacgttacaacggaagtaaaatctgtcgaaatgcaccatgaagctttgagtgaagctcttcctggggacaatgtgggcttcaatgtcaagaatgtgtctgtcaaggatgttcgtcgtggcaacgttgctggtgacagcaaaaatgacccaccaatggaagcagctggcttcactgctcaggtgattatcctgaaccatccaggccaaataagcgccggctatgcccctgtattggattgccacacggctcacattgcatgcaagtttgctgagctgaaggaaaagattgatcgccgttctggtaaaaagctggaagatggccctaaattcttgaagtctggtgatgctgccattgttgatatggttcctggcaagcccatgtgtgttgagagcttctcagactatccacctttgggtcgctttgctgttcgtgatatgagacagacagttgcggtgggtgtcatcaaagcagtggacaagaaggctgctggagctggcaaggtcaccaagtctgcccagaaagctcagaaggctaaatga

SEQ ID NO: 526 - DNA, 864 bp, Homo Sapiens
atggagctggagaggatcgtcagtgcagccctccttgcctttgtccagacacacctcccggaggccgacctcagtggcttggatgaggtcatcttctcctatgtgcttggggtcctggaggacctgggcccctcgggcccatcagaggagaacttcgatatggaggctttcactgagatgatggaggcctatgtgcctggcttcgcccacatccccaggggcacaataggggacatgatgcagaagctctcagggcagctgagcgatgccaggaacaaagagaacctgcaaccgcagagctctggtgtccaaggtcaggtgcccatctccccagagcccctgcagcggcccgaaatgctcaaagaagagactaggtcttcggctgctgctgctgcagacacccaagatgaggcaactggcgctgaggaggagcttctgccaggggtggatgtactcctggaggtgttccctacctgttcggtggagcaggcccagtgggtgctggccaaagctcggggggacttggaagaagctgtgcagatgctggtagagggaaaggaagaggggcctgcagcctgggagggccccaaccaggacctgcccagacgcctcagaggcccccaaaaggatgagctgaagtccttcatcctgcagaagtacatgatggtggatagcgcagaggatcagaagattcaccggcccatggctcccaaggaggcccccaagaagctgatccgatacatcgacaaccaggtagtgagcaccaaaggggagcgattcaaagatgtgcggaaccctgaggccgaggagatgaaggccacatacatcaacctcaagccagccagaaagtaccgcttccattga

SEQ ID NO: 527 - DNA, 1356 bp, Homo Sapiens
atgcgtgagtgcatctccatccacgttggccaggctggtgtccagattggcaatgcctgctgggagctctactgcctggaacacggcatccagcccgatggccagatgccaagtgacaagaccattgggggaggagatgattccttcaacaccttcttcagtgagacgggggctggcaagcatgtgccccgggcagtgtttgtagacttggaacccacagtcattgatgaagttcgcactggcacctaccgccagctcttccaccctgagcaacttatcacaggcaaagaagatgctgccaataactatgcccgagggcactacaccattggcaaggagatcattgacctcgtgttggaccgaattcgcaagctggccgaccagtgcacgggtctccagggcttcttggttttccacagctttggtgggggaactggttctgggttcacctcgctgctcatggaacgtctctcagttgattatggcaagaagtccaagctggagttctctatttacccggcgccccaggtttccacagctgtagttgagccctacaactccatcctcaccacccacaccaccctggagcactctgattgtgccttcatggtagacaatgaggccatctatgacatctgtcgtagaaacctcgatattgagcgtccaacctatactaacctgaataggttaataggtcaaattgtgtcctccatcactgcttccctgagatttgatggagccctgaatgttgacctgacagaattccagaccaacctggtgccctatccccgcatccacttccctctggccacatatgcccctgtcatctctgctgagaaagcctaccatgaacagctttctgtagcagagatcaccaatgcttgctttgagccagccaaccagatggtgaaatgtgaccctcgccatggtaaatacatggcttgctgcctgttgtaccgtggtgacgtggttcccaaagatgtcaatgctgccattgccaccatcaagaccaagcgtaccatccagtttgtggattggtgccccactggcttcaaggttggcatcaactaccagcctcccactgtggtgcctggtggagacctggccaaggtacagagagctgtgtgcatgctgagcaacaccacagccattgctgaggcctgggctcgcctggaccacaagtttgacctgatgtatgccaaacgtgcctttgttcactggtacgttggggaggggatggaggaaggtgagttttcagaggcccgtgaggacatggctgcccttgagaaggattatgaggaggttggtgtggattctgttgaaggagagggtgaggaagaaggagaggaatactaa

SEQ ID NO: 528 - DNA, 1434 bp, Homo Sapiens
atgttcccggtgtttccttgcacgctgctggccccccccttccccgtgctgggcctggactcccggggggtgggcggcctcatgaactccttcccgccacctcagggtcacgcccagaaccccctgcaggtcggggctgagctccagtcccgcttctttgcctcccagggctgcgcccagagtccattccaggccgcgccggcgcccccgcccacgccccaggccccggcggccgagcccctccaggtggacttgctcccggtgctcgccgccgcccaggagtccgccgcggctgctgcggccgctgccgccgctgctgccgccgtcgctgccgcgcccccggcccctgccgccgcctctacggtggacacagcggccctgaagcagcctccggcgccccctccgccacccccgccagtgtcggcgcccgcggccgaggccgcgccccccgcctccgccgccactatcgccgcggcggcggccaccgccgtcgtagccccaacctcgacggtcgccgtggccccggtcgcgtctgccttggagaagaagacaaagagcaaggggccctacatctgcgctctgtgcgccaaggagttcaagaacggctacaatctccggaggcacgaagccatccacacgggagccaaggccggccgggtcccctcgggtgctatgaagatgccgaccatggtgcccctgagcctcctgagcgtgccccagctgagcggagccggcgggggagggggagaggcgggtgccggcggcggcgctgccgcagtggccgccggtggcgtggtgaccacgaccgcctcggggaagcgcatccggaagaaccatgcctgcgagatgtgtggcaaggccttccgcgacgtctaccacctgaaccgacacaagctgtcgcactcggacgagaagccctaccagtgcccggtgtgccagcagcgcttcaagcgcaaggaccgcatgagctaccacgtgcgctcacatgacggcgctgtgcacaagccctacaactgctcccactgtggcaagagcttctcccggccggatcacctcaacagtcacgtcagacaagtgcactcaacagaacggcccttcaaatgtgagaaatgtgaggcagctttcgccacgaaggatcggctgcgggcgcacacagtacgacacgaggagaaagtgccatgtcacgtgtgtggcaagatgctgagctcggcttatatttcggaccacatgaaggtgcacagccagggtcctcaccatgtctgtgagctctgcaacaaaggtactggtgaggtttgtccaatggcggcggcagcggcagcggcggcagcggcagcagcggcagcagtagcagcccctcccacagctgtgggctccctctcgggggcggagggggtgcctgtgagctctcagccacttccctcccaaccctggtga
